United States Patent Application Publication US 2020/0270635 A1 - sequence listing, part 2

SEQ ID NO: 2151 - DNA, 2203 bp, Artificial Sequence
  Description of Artificial Sequence: Synthetic polynucleotide
atgtcttttgttgatcaccctccagattggttggaagaagttggtgaaggtcttcgcgagtttttgggccttgaagcgggcccaccgaaaccaaaacccaatcagcagcatcaagatcaagcccgtggtcttgtgctgcctggttataactatctcggacccggaaacggtctcgatcgaggagagcctgtcaacagggcagacgaggtcgcgcgagagcacgacatctcgtacaacgagcagcttgaggcgggagacaacccctacctcaagtacaaccacgcggacgccgagtttcaggagaagctcgccgacgacacatccttcgggggaaacctcggaaaggcagtctttcaggccaagaaaagggttctcgaaccttttggcctggttgaagagggtgctaagacggcccctaccggaaagcggatagacgaccactttccaaaaagaaagaaggctcggaccgaagaggactccaagccttccacctcgtcagacgccgaagctggacccagcggatcccagcagctgcaaatcccagcccaaccagcctcaagtttgggagctgatacaatgtctgcgggaggtggcggcccattgggcgacaataaccaaggtgccgatggagtgggcaatgcctcgggagattggcattgcgattccacgtggatgggggacagagtcgtcaccaagtccacccgaacctgggtgctgcccagctacaacaaccaccagtaccgagagatcaaaagcggctccgtcgacggaagcaacgccaacgcctactttggatacagcaccccctgggggtactttgactttaaccgcttccacagccactggagcccccgagactggcaaagactcatcaacaactactggggcttcagaccccggtccctcagagtcaaaatcttcaacattcaagtcaaagaggtcacggtgcaggactccaccaccaccatcgccaacaacctcacctccaccgtccaagtgtttacggacgacgactaccagctgccctacgtcgtcggcaacgggaccgagggatgcctgccggccttccctccgcaggtctttacgctgccgcagtacggttacgcgacgctgaaccgcgacaacacagaaaatcccaccgagaggagcagcttcttctgcctagagtactttcccagcaagatgctgagaacgggcaacaactttgagtttacctacaactttgaggaggtgcccttccactccagcttcgctcccagtcagaacctgttcaagctggccaacccgctggtggaccagtacttgtaccgcttcgtgagcacaaataacactggcggagtccagttcaacaagaacctggccgggagatacgccaacacctacaaaaactggttcccggggcccatgggccgaacccagggctggaacctgggctccggggtcaaccgcgccagtgtcagcgccttcgccacgaccaataggatggagctcgagggcgcgagttaccaggtgcccccgcagccgaacggcatgaccaacaacctccagggcagcaacacctatgccctggagaacactatgatcttcaacagccagccggcgaacccgggcaccaccgccacgtacctcgagggcaacatgctcatcaccagcgagagcgagacgcagccggtgaaccgcgtggcgtacaacgtcggcgggcaggtggccaccaacaaccagagctccaccactgcccccgcgaccggcacgtacaacctccaggaaatcgtgcccggcagcgtgtggatggagagggacgtgtacctccaaggacccatctgggccaagatcccagagacgggggcgcactttcacccctctccggccatgggcggattcggactcaaacacccaccgcccatgatgctcatcaagaacacgcctgtgcccggaaatatcaccagcttctcggacgtgcccgtcagcagcttcatcacccagtacagcaccgggcaggtcaccgtggagatggagtgggagctcaagaaggaaaactccaagaggtggaacccagagatccagtacacaaacaactacaacgacccccagtttgtggactttgccccggacagcaccggggaatacagaaccaccagacctatcggaacccgataccttacccgacccctttaacccattcatgtcgcataccctcaataaa

SEQ ID NO: 2152 - protein, 724 aa, Artificial Sequence
  Description of Artificial Sequence: Synthetic polypeptide
MSFVDHPPDWLEEVGEGLREFLGLEAGPPKPKPNQQHQDQARGLVLPGYNYLGPGNGLDRGEPVNRADEVAREHDISYNEQLEAGDNPYLKYNHADAEFQEKLADDTSFGGNLGKAVFQAKKRVLEPFGLVEEGAKTAPTGKRIDDHFPKRKKARTEEDSKPSTSSDAEAGPSGSQQLQIPAQPASSLGADTMSAGGGGPLGDNNQGADGVGNASGDWHCDSTWMGDRVVTKSTRTWVLPSYNNHQYREIKSGSVDGSNANAYFGYSTPWGYFDFNRFHSHWSPRDWQRLINNYWGFRPRSLRVKIFNIQVKEVTVQDSTTTIANNLTSTVQVFTDDDYQLPYVVGNGTEGCLPAFPPQVFTLPQYGYATLNRDNTENPTERSSFFCLEYFPSKMLRTGNNFEFTYNFEEVPFHSSFAPSQNLFKLANPLVDQYLYRFVSTNNTGGVQFNKNLAGRYANTYKNWFPGPMGRTQGWNLGSGVNRASVSAFATTNRMELEGASYQVPPQPNGMTNNLQGSNTYALENTMIFNSQPANPGTTATYLEGNMLITSESETQPVNRVAYNVGGQVATNNQSSTTAPATGTYNLQEIVPGSVWMERDVYLQGPIWAKIPETGAHFHPSPAMGGFGLKHPPPMMLIKNTPVPGNITSFSDVPVSSFITQYSTGQVTVEMEWELKKENSKRWNPEIQYTNNYNDPQFVDFAPDSTGEYRTTRPIGTRYLTRPL

SEQ ID NO: 2153 - DNA, 2203 bp, Artificial Sequence
  Description of Artificial Sequence: Synthetic polynucleotide
atgtcttttgttgatcaccctccagattggttggaagaagttggtgaaggtcttcgcgagtttttgggccttgaagcgggcccaccgaaaccaaaacccaatcagcagcatcaagatcaagcccgtggtcttgtgctgcctggttataactatctcggacccggaaacggtctcgatcgaggagagcctgtcaacagggcagacgaggtcgcgcgagagcacgacatctcgtacaacgagcagcttgaggcgggagacaacccctacctcaagtacaaccacgcggacgccgagtttcaggagaagctcgccgacgacacatccttcgggggaaacctcggaaaggcagtctttcaggccaagaaaagggttctcgaaccttttggcctggttgaagagggtgctaagacggcccctaccggaaagcggatagacgaccactttccaaaaagaaagaaggctcggaccgaagaggactccaagccttccacctcgtcagacgccgaagctggacccagcggatcccagcagctgcaaatcccagcccaaccagcctcaagtttgggagctgatacaatgtctgcgggaggtggcggcccattgggcgacaataaccaaggtgccgatggagtgggcaatgcctcgggagattggcattgcgattccacgtggatgggggacagagtcgtcaccaagtccacccgaacctgggtgctgcccagctacaacaaccaccagtaccgagagatcaaaagcggctccgtcgacggaagcaacgccaacgcctactttggatacagcaccccctgggggtactttgactttaaccgcttccacagccactggagcccccgagactggcaaagactcatcaacaactactggggcttcagaccccggtccctcagagtcaaaatcttcaacattcaagtcaaagaggtcacggtgcaggactccaccaccaccatcgccaacaacctcacctccaccgtccaagtgtttacggacgacgactaccagctgccctacgtcgtcggcaacgggaccgagggatgcctgccggccttccctccgcaggtctttacgctgccgcagtacggttacgcgacgctgaaccgcgacaacacagaaaatcccaccgagaggagcagcttcttctgcctagagtactttcccagcaagatgctgagaacgggcaacaactttgagtttacctacaactttgaggaggtgcccttccactccagcttcgctcccagtcagaacctgttcaagctggccaacccgctggtggaccagtacttgtaccgcttcgtgagcacaaataacactggcggagtccagttcaacaagaacctggccgggagatacgccaacacctacaaaaactggttcccggggcccatgggccgaacccagggctggaacctgggctccggggtcaaccgcgccagtgtcagcgccttcgccacgaccaataggatggagctcgagggcgcgagttaccaggtgcccccgcagccgaacggcatgaccaacaacctccagggcagcaacacctatgccctggagaacactatgatcttcaacagccagccggcgaacccgggcaccaccgccacgtacctcgagggcaacatgctcatcaccagcgagagcgagacgcagccggtgaaccgcgtggcgtacaacgtcggcgggcagatggccaccaacaaccagagctccaccactgcccccgcgaccggcacggtcaacctccaggaaatcgtgcccggcagcgtgtggatggagagggacgtgtacctccaaggacccatctgggccaagatcccagagacgggggcgcactttcacccctctccggccatgggcggattcggactcaaacacccaccgcccatgatgctcatcaagaacacgcctgtgcccggaaatatcaccagcttctcggacgtgcccgtcagcagcttcatcacccagtacagcaccgggcaggtcaccgtggagatggagtgggagctcaagaaggaaaactccaagaggtggaacccagagatccagtacacaaacaactacaacgacccccagtttgtggactttgccccggacagcaccggggaatacagaaccaccagacctatcggaacccgataccttacccgacccctttaacccattcatgtcgcataccctcaataaa

SEQ ID NO: 2154 - protein, 724 aa, Artificial Sequence
  Description of Artificial Sequence: Synthetic polypeptide
MSFVDHPPDWLEEVGEGLREFLGLEAGPPKPKPNQQHQDQARGLVLPGYNYLGPGNGLDRGEPVNRADEVAREHDISYNEQLEAGDNPYLKYNHADAEFQEKLADDTSFGGNLGKAVFQAKKRVLEPFGLVEEGAKTAPTGKRIDDHFPKRKKARTEEDSKPSTSSDAEAGPSGSQQLQIPAQPASSLGADTMSAGGGGPLGDNNQGADGVGNASGDWHCDSTWMGDRVVTKSTRTWVLPSYNNHQYREIKSGSVDGSNANAYFGYSTPWGYFDFNRFHSHWSPRDWQRLINNYWGFRPRSLRVKIFNIQVKEVTVQDSTTTIANNLTSTVQVFTDDDYQLPYVVGNGTEGCLPAFPPQVFTLPQYGYATLNRDNTENPTERSSFFCLEYFPSKMLRTGNNFEFTYNFEEVPFHSSFAPSQNLFKLANPLVDQYLYRFVSTNNTGGVQFNKNLAGRYANTYKNWFPGPMGRTQGWNLGSGVNRASVSAFATTNRMELEGASYQVPPQPNGMTNNLQGSNTYALENTMIFNSQPANPGTTATYLEGNMLITSESETQPVNRVAYNVGGQMATNNQSSTTAPATGTVNLQEIVPGSVWMERDVYLQGPIWAKIPETGAHFHPSPAMGGFGLKHPPPMMLIKNTPVPGNITSFSDVPVSSFITQYSTGQVTVEMEWELKKENSKRWNPEIQYTNNYNDPQFVDFAPDSTGEYRTTRPIGTRYLTRPL

SEQ ID NO: 2155 - DNA, 2203 bp, Artificial Sequence
  Description of Artificial Sequence: Synthetic polynucleotide
atgtcttttgttgatcaccctccagattggttggaagaagttggtgaaggtcttcgcgagtttttgggccttgaagcgggcccaccgaaaccaaaacccaatcagcagcatcaagatcaagcccgtggtcttgtgctgcctggttataactatctcggacccggaaacggtctcgatcgaggagagcctgtcaacagggcagacgaggtcgcgcgagagcacgacatctcgtacaacgagcagcttgaggcgggagacaacccctacctcaagtacaaccacgcggacgccgagtttcaggagaagctcgccgacgacacatccttcgggggaaacctcggaaaggcagtctttcaggccaagaaaagggttctcgaaccttttggcctggttgaagagggtgctaagacggcccctaccggaaagcggatagacgaccactttccaaaaagaaagaaggctcggaccgaagaggactccaagccttccacctcgtcagacgccgaagctggacccagcggatcccagcagctgcaaatcccagcccaaccagcctcaagtttgggagctgatacaatgtctgcgggaggtggcggcccattgggcgacaataaccaaggtgccgatggagtgggcaatgcctcgggagattggcattgcgattccacgtggatgggggacagagtcgtcaccaagtccacccgaacctgggtgctgcccagctacaacaaccaccagtaccgagagatcaaaagcggctccgtcgacggaagcaacgccaacgcctactttggatacagcaccccctgggggtactttgactttaaccgcttccacagccactggagcccccgagactggcaaagactcatcaacaactactggggcttcagaccccggtccctcagagtcaaaatcttcaacattcaagtcaaagaggtcacggtgcaggactccaccaccaccatcgccaacaacctcacctccaccgtccaagtgtttacggacgacgactaccagctgccctacgtcgtcggcaacgggaccgagggatgcctgccggccttccctccgcaggtctttacgctgccgcagtacggttacgcgacgctgaaccgcgacaacacagaaaatcccaccgagaggagcagcttcttctgcctagagtactttcccagcaagatgctgagaacgggcaacaactttgagtttacctacaactttgaggaggtgcccttccactccagcttcgctcccagtcagaacctgttcaagctggccaacccgctggtggaccagtacttgtaccgcttcgtgagcacaaataacactggcggagtccagttcaacaagaacctggccgggagatacgccaacacctacaaaaactggttcccggggcccatgggccgaacccagggctggaacctgggctccggggtcaaccgcgccagtgtcagcgccttcgccacgaccaataggatggagctcgagggcgcgagttaccaggtgcccccgcagccgaacggcatgaccaacaacctccagggcagcaacacctatgccctggagaacactatgatcttcaacagccagccggcgaacccgggcaccaccgccacgtacctcgagggcaacatgctcatcaccagcgagagcgagacgcagccggtgaaccgcgtggcgtacaacgtcggcgggcagatggccaccaacaaccagagctccaccactgcccccgcgaccggcacgtacaacacccaggaaatcgtgcccggcagcgtgtggatggagagggacgtgtacctccaaggacccatctgggccaagatcccagagacgggggcgcactttcacccctctccggccatgggcggattcggactcaaacacccaccgcccatgatgctcatcaagaacacgcctgtgcccggaaatatcaccagcttctcggacgtgcccgtcagcagcttcatcacccagtacagcaccgggcaggtcaccgtggagatggagtgggagctcaagaaggaaaactccaagaggtggaacccagagatccagtacacaaacaactacaacgacccccagtttgtggactttgccccggacagcaccggggaatacagaaccaccagacctatcggaacccgataccttacccgacccctttaacccattcatgtcgcataccctcaataaa

SEQ ID NO: 2156 - protein, 724 aa, Artificial Sequence
  Description of Artificial Sequence: Synthetic polypeptide
MSFVDHPPDWLEEVGEGLREFLGLEAGPPKPKPNQQHQDQARGLVLPGYNYLGPGNGLDRGEPVNRADEVAREHDISYNEQLEAGDNPYLKYNHADAEFQEKLADDTSFGGNLGKAVFQAKKRVLEPFGLVEEGAKTAPTGKRIDDHFPKRKKARTEEDSKPSTSSDAEAGPSGSQQLQIPAQPASSLGADTMSAGGGGPLGDNNQGADGVGNASGDWHCDSTWMGDRVVTKSTRTWVLPSYNNHQYREIKSGSVDGSNANAYFGYSTPWGYFDFNRFHSHWSPRDWQRLINNYWGFRPRSLRVKIFNIQVKEVTVQDSTTTIANNLTSTVQVFTDDDYQLPYVVGNGTEGCLPAFPPQVFTLPQYGYATLNRDNTENPTERSSFFCLEYFPSKMLRTGNNFEFTYNFEEVPFHSSFAPSQNLFKLANPLVDQYLYRFVSTNNTGGVQFNKNLAGRYANTYKNWFPGPMGRTQGWNLGSGVNRASVSAFATTNRMELEGASYQVPPQPNGMTNNLQGSNTYALENTMIFNSQPANPGTTATYLEGNMLITSESETQPVNRVAYNVGGQMATNNQSSTTAPATGTYNTQEIVPGSVWMERDVYLQGPIWAKIPETGAHFHPSPAMGGFGLKHPPPMMLIKNTPVPGNITSFSDVPVSSFITQYSTGQVTVEMEWELKKENSKRWNPEIQYTNNYNDPQFVDFAPDSTGEYRTTRPIGTRYLTRPL

SEQ ID NO: 2157 - DNA, 2203 bp, Artificial Sequence
  Description of Artificial Sequence: Synthetic polynucleotide
atgtcttttgttgatcaccctccagattggttggaagaagttggtgaaggtcttcgcgagtttttgggccttgaagcgggcccaccgaaaccaaaacccaatcagcagcatcaagatcaagcccgtggtcttgtgctgcctggttataactatctcggacccggaaacggtctcgatcgaggagagcctgtcaacagggcagacgaggtcgcgcgagagcacgacatctcgtacaacgagcagcttgaggcgggagacaacccctacctcaagtacaaccacgcggacgccgagtttcaggagaagctcgccgacgacacatccttcgggggaaacctcggaaaggcagtctttcaggccaagaaaagggttctcgaaccttttggcctggttgaagagggtgctaagacggcccctaccggaaagcggatagacgaccactttccaaaaagaaagaaggctcggaccgaagaggactccaagccttccacctcgtcagacgccgaagctggacccagcggatcccagcagctgcaaatcccagcccaaccagcctcaagtttgggagctgatacaatgtctgcgggaggtggcggcccattgggcgacaataaccaaggtgccgatggagtgggcaatgcctcgggagattggcattgcgattccacgtggatgggggacagagtcgtcaccaagtccacccgaacctgggtgctgcccagctacaacaaccaccagtaccgagagatcaaaagcggctccgtcgacggaagcaacgccaacgcctactttggatacagcaccccctgggggtactttgactttaaccgcttccacagccactggagcccccgagactggcaaagactcatcaacaactactggggcttcagaccccggtccctcagagtcaaaatcttcaacattcaagtcaaagaggtcacggtgcaggactccaccaccaccatcgccaacaacctcacctccaccgtccaagtgtttacggacgacgactaccagctgccctacgtcgtcggcaacgggaccgagggatgcctgccggccttccctccgcaggtctttacgctgccgcagtacggttacgcgacgctgaaccgcgacaacacagaaaatcccaccgagaggagcagcttcttctgcctagagtactttcccagcaagatgctgagaacgggcaacaactttgagtttacctacaactttgaggaggtgcccttccactccagcttcgctcccagtcagaacctgttcaagctggccaacccgctggtggaccagtacttgtaccgcttcgtgagcacaaataacactggcggagtccagttcaacaagaacctggccgggagatacgccaacacctacaaaaactggttcccggggcccatgggccgaacccagggctggaacctgggctccggggtcaaccgcgccagtgtcagcgccttcgccacgaccaataggatggagctcgagggcgcgagttaccaggtgcccccgcagccgaacggcatgaccaacaacctccagggcagcaacacctatgccctggagaacactatgatcttcaacagccagccggcgaacccgggcaccaccgccacgtacctcgagggcaacatgctcatcaccagcgagagcgagacgcagccggtgaaccgcgtggcgtacaacgtcggcgggcagatggccaccaacaaccagagctccaccactgcccccgcgaccggcacggtcaacacccaggaaatcgtgcccggcagcgtgtggatggagagggacgtgtacctccaaggacccatctgggccaagatcccagagacgggggcgcactttcacccctctccggccatgggcggattcggactcaaacacccaccgcccatgatgctcatcaagaacacgcctgtgcccggaaatatcaccagcttctcggacgtgcccgtcagcagcttcatcacccagtacagcaccgggcaggtcaccgtggagatggagtgggagctcaagaaggaaaactccaagaggtggaacccagagatccagtacacaaacaactacaacgacccccagtttgtggactttgccccggacagcaccggggaatacagaaccaccagacctatcggaacccgataccttacccgacccctttaacccattcatgtcgcataccctcaataaa

SEQ ID NO: 2158 - protein, 724 aa, Artificial Sequence
  Description of Artificial Sequence: Synthetic polypeptide
MSFVDHPPDWLEEVGEGLREFLGLEAGPPKPKPNQQHQDQARGLVLPGYNYLGPGNGLDRGEPVNRADEVAREHDISYNEQLEAGDNPYLKYNHADAEFQEKLADDTSFGGNLGKAVFQAKKRVLEPFGLVEEGAKTAPTGKRIDDHFPKRKKARTEEDSKPSTSSDAEAGPSGSQQLQIPAQPASSLGADTMSAGGGGPLGDNNQGADGVGNASGDWHCDSTWMGDRVVTKSTRTWVLPSYNNHQYREIKSGSVDGSNANAYFGYSTPWGYFDFNRFHSHWSPRDWQRLINNYWGFRPRSLRVKIFNIQVKEVTVQDSTTTIANNLTSTVQVFTDDDYQLPYVVGNGTEGCLPAFPPQVFTLPQYGYATLNRDNTENPTERSSFFCLEYFPSKMLRTGNNFEFTYNFEEVPFHSSFAPSQNLFKLANPLVDQYLYRFVSTNNTGGVQFNKNLAGRYANTYKNWFPGPMGRTQGWNLGSGVNRASVSAFATTNRMELEGASYQVPPQPNGMTNNLQGSNTYALENTMIFNSQPANPGTTATYLEGNMLITSESETQPVNRVAYNVGGQMATNNQSSTTAPATGTVNTQEIVPGSVWMERDVYLQGPIWAKIPETGAHFHPSPAMGGFGLKHPPPMMLIKNTPVPGNITSFSDVPVSSFITQYSTGQVTVEMEWELKKENSKRWNPEIQYTNNYNDPQFVDFAPDSTGEYRTTRPIGTRYLTRPL

SEQ ID NO: 2159 - DNA, 2203 bp, Artificial Sequence
  Description of Artificial Sequence: Synthetic polynucleotide
atgtcttttgttgatcaccctccagattggttggaagaagttggtgaaggtcttcgcgagtttttgggccttgaagcgggcccaccgaaaccaaaacccaatcagcagcatcaagatcaagcccgtggtcttgtgctgcctggttataactatctcggacccggaaacggtctcgatcgaggagagcctgtcaacagggcagacgaggtcgcgcgagagcacgacatctcgtacaacgagcagcttgaggcgggagacaacccctacctcaagtacaaccacgcggacgccgagtttcaggagaagctcgccgacgacacatccttcgggggaaacctcggaaaggcagtctttcaggccaagaaaagggttctcgaaccttttggcctggttgaagagggtgctaagacggcccctaccggaaagcggatagacgaccactttccaaaaagaaagaaggctcggaccgaagaggactccaagccttccacctcgtcagacgccgaagctggacccagcggatcccagcagctgcaaatcccagcccaaccagcctcaagtttgggagctgatacaatgtctgcgggaggtggcggcccattgggcgacaataaccaaggtgccgatggagtgggcaatgcctcgggagattggcattgcgattccacgtggatgggggacagagtcgtcaccaagtccacccgaacctgggtgctgcccagctacaacaaccaccagtaccgagagatcaaaagcggctccgtcgacggaagcaacgccaacgcctactttggatacagcaccccctgggggtactttgactttaaccgcttccacagccactggagcccccgagactggcaaagactcatcaacaactactggggcttcagaccccggtccctcagagtcaaaatcttcaacattcaagtcaaagaggtcacggtgcaggactccaccaccaccatcgccaacaacctcacctccaccgtccaagtgtttacggacgacgactaccagctgccctacgtcgtcggcaacgggaccgagggatgcctgccggccttccctccgcaggtctttacgctgccgcagtacggttacgcgacgctgaaccgcgacaacacagaaaatcccaccgagaggagcagcttcttctgcctagagtactttcccagcaagatgctgagaacgggcaacaactttgagtttacctacaactttgaggaggtgcccttccactccagcttcgctcccagtcagaacctgttcaagctggccaacccgctggtggaccagtacttgtaccgcttcgtgagcacaaataacactggcggagtccagttcaacaagaacctggccgggagatacgccaacacctacaaaaactggttcccggggcccatgggccgaacccagggctggaacctgggctccggggtcaaccgcgccagtgtcagcgccttcgccacgaccaataggatggagctcgagggcgcgagttaccaggtgcccccgcagccgaacggcatgaccaacaacctccagggcagcaacacctatgccctggagaacactatgatcttcaacagccagccggcgaacccgggcaccaccgccacgtacctcgagggcaacatgctcatcaccagcgagagcgagacgcagccggtgaaccgcgtggcgtacaacgtcggcgggcagatggccaccaacaaccagagctccaccactgcccccgcgaccggcacgtacaacctccaggaaatcgtgcccggcagcgtgtggatggagagggacgtgtacctccaaggacccatctgggccaagatcccagagacgggggcgcactttcacccctctccggccatgggcggattcggactcaaacacccaccgcccatgatgctcatcaagaacacgcctgtgcccggaaatatcaccagcttctcggccgtgcccgtcagcagcttcatcacccagtacagcaccgggcaggtcaccgtggagatggagtgggagctcaagaaggaaaactccaagaggtggaacccagagatccagtacacaaacaactacaacgacccccagtttgtggactttgccccggacagcaccggggaatacagaaccaccagacctatcggaacccgataccttacccgacccctttaacccattcatgtcgcataccctcaataaa

SEQ ID NO: 2160 - protein, 724 aa, Artificial Sequence
  Description of Artificial Sequence: Synthetic polypeptide
MSFVDHPPDWLEEVGEGLREFLGLEAGPPKPKPNQQHQDQARGLVLPGYNYLGPGNGLDRGEPVNRADEVAREHDISYNEQLEAGDNPYLKYNHADAEFQEKLADDTSFGGNLGKAVFQAKKRVLEPFGLVEEGAKTAPTGKRIDDHFPKRKKARTEEDSKPSTSSDAEAGPSGSQQLQIPAQPASSLGADTMSAGGGGPLGDNNQGADGVGNASGDWHCDSTWMGDRVVTKSTRTWVLPSYNNHQYREIKSGSVDGSNANAYFGYSTPWGYFDFNRFHSHWSPRDWQRLINNYWGFRPRSLRVKIFNIQVKEVTVQDSTTTIANNLTSTVQVFTDDDYQLPYVVGNGTEGCLPAFPPQVFTLPQYGYATLNRDNTENPTERSSFFCLEYFPSKMLRTGNNFEFTYNFEEVPFHSSFAPSQNLFKLANPLVDQYLYRFVSTNNTGGVQFNKNLAGRYANTYKNWFPGPMGRTQGWNLGSGVNRASVSAFATTNRMELEGASYQVPPQPNGMTNNLQGSNTYALENTMIFNSQPANPGTTATYLEGNMLITSESETQPVNRVAYNVGGQMATNNQSSTTAPATGTYNLQEIVPGSVWMERDVYLQGPIWAKIPETGAHFHPSPAMGGFGLKHPPPMMLIKNTPVPGNITSFSAVPVSSFITQYSTGQVTVEMEWELKKENSKRWNPEIQYTNNYNDPQFVDFAPDSTGEYRTTRPIGTRYLTRPL

SEQ ID NO: 2161 - DNA, 2203 bp, Artificial Sequence
  Description of Artificial Sequence: Synthetic polynucleotide
atgtcttttgttgatcaccctccagattggttggaagaagttggtgaaggtcttcgcgagtttttgggccttgaagcgggcccaccgaaaccaaaacccaatcagcagcatcaagatcaagcccgtggtcttgtgctgcctggttataactatctcggacccggaaacggtctcgatcgaggagagcctgtcaacagggcagacgaggtcgcgcgagagcacgacatctcgtacaacgagcagcttgaggcgggagacaacccctacctcaagtacaaccacgcggacgccgagtttcaggagaagctcgccgacgacacatccttcgggggaaacctcggaaaggcagtctttcaggccaagaaaagggttctcgaaccttttggcctggttgaagagggtgctaagacggcccctaccggaaagcggatagacgaccactttccaaaaagaaagaaggctcggaccgaagaggactccaagccttccacctcgtcagacgccgaagctggacccagcggatcccagcagctgcaaatcccagcccaaccagcctcaagtttgggagctgatacaatgtctgcgggaggtggcggcccattgggcgacaataaccaaggtgccgatggagtgggcaatgcctcgggagattggcattgcgattccacgtggatgggggacagagtcgtcaccaagtccacccgaacctgggtgctgcccagctacaacaaccaccagtaccgagagatcaaaagcggctccgtcgacggaagcaacgccaacgcctactttggatacagcaccccctgggggtactttgactttaaccgcttccacagccactggagcccccgagactggcaaagactcatcaacaactactggggcttcagaccccggtccctcagagtcaaaatcttcaacattcaagtcaaagaggtcacggtgcaggactccaccaccaccatcgccaacaacctcacctccaccgtccaagtgtttatggacgacgactaccagctgccctacgtcgtcggcaacgggaccgagggatgcctgccggccttccctccgcaggtctttacgctgccgcagtacggttacgcgacgctgaaccgcgacaacacagaaaatcccaccgagaggagcagcttcttctgcctagagtactttcccagcaagatgctgagaacgggcaacaactttgagtttacctacaactttgaggaggtgcccttccactccagcttcgctcccagtcagaacctgttcaagctggccaacccgctggtggaccagtacttgtaccgcttcgtgagcacaaataacactggcggagtccagttcaacaagaacctggccgggagatacgccaacacctacaaaaactggttcccggggcccatgggccgaacccagggctggaacctgggctccggggtcaaccgcgccagtgtcagcgccttcgccacgaccaataggatggagctcgagggcgcgagttaccaggtgcccccgcagccgaacggcatgaccaacaacctccagggcagcaacacctatgccctggagaacactatgatcttcaacagccagccggcgaacccgggcaccaccgccacgtacctcgagggcaacatgctcatcaccagcgagagcgagacgcagccggtgaaccgcgtggcgtacaacgtcggcgggcagatggccaccaacaaccagagctccaccactgcccccgcgaccggcacgtacaacctccaggaaatcgtgcccggcagcgtgtggatggagagggacgtgtacctccaaggacccatctgggccaagatcccagagacgggggcgcactttcacccctctccggccatgggcggattcggactcaaacacccaccgcccatgatgctcatcaagaacacgcctgtgcccggaaatatcaccagcttctcggacgtgcccgtcagcagcttcatcacccagtacagcaccgggcaggtcaccgtggagatggagtgggagctcaagaaggaaaactccaagaggtggaacccagagatccagtacacaaacaactacaacgacccccagtttgtggactttgccccggacagcaccggggaatacagaaccaccagacctatcggaacccgataccttacccgacccctttaacccattcatgtcgcataccctcaataaa

SEQ ID NO: 2162 - protein, 724 aa, Artificial Sequence
  Description of Artificial Sequence: Synthetic polypeptide
MSFVDHPPDWLEEVGEGLREFLGLEAGPPKPKPNQQHQDQARGLVLPGYNYLGPGNGLDRGEPVNRADEVAREHDISYNEQLEAGDNPYLKYNHADAEFQEKLADDTSFGGNLGKAVFQAKKRVLEPFGLVEEGAKTAPTGKRIDDHFPKRKKARTEEDSKPSTSSDAEAGPSGSQQLQIPAQPASSLGADTMSAGGGGPLGDNNQGADGVGNASGDWHCDSTWMGDRVVTKSTRTWVLPSYNNHQYREIKSGSVDGSNANAYFGYSTPWGYFDFNRFHSHWSPRDWQRLINNYWGFRPRSLRVKIFNIQVKEVTVQDSTTTIANNLTSTVQVFMDDDYQLPYVVGNGTEGCLPAFPPQVFTLPQYGYATLNRDNTENPTERSSFFCLEYFPSKMLRTGNNFEFTYNFEEVPFHSSFAPSQNLFKLANPLVDQYLYRFVSTNNTGGVQFNKNLAGRYANTYKNWFPGPMGRTQGWNLGSGVNRASVSAFATTNRMELEGASYQVPPQPNGMTNNLQGSNTYALENTMIFNSQPANPGTTATYLEGNMLITSESETQPVNRVAYNVGGQMATNNQSSTTAPATGTYNLQEIVPGSVWMERDVYLQGPIWAKIPETGAHFHPSPAMGGFGLKHPPPMMLIKNTPVPGNITSFSDVPVSSFITQYSTGQVTVEMEWELKKENSKRWNPEIQYTNNYNDPQFVDFAPDSTGEYRTTRPIGTRYLTRPL

SEQ ID NO: 2163 - DNA, 2203 bp, Artificial Sequence
  Description of Artificial Sequence: Synthetic polynucleotide
atgtcttttgttgatcaccctccagattggttggaagaagttggtgaaggtcttcgcgagtttttgggccttgaagcgggcccaccgaaaccaaaacccaatcagcagcatcaagatcaagcccgtggtcttgtgctgcctggttataactatctcggacccggaaacggtctcgatcgaggagagcctgtcaacagggcagacgaggtcgcgcgagagcacgacatctcgtacaacgagcagcttgaggcgggagacaacccctacctcaagtacaaccacgcggacgccgagtttcaggagaagctcgccgacgacacatccttcgggggaaacctcggaaaggcagtctttcaggccaagaaaagggttctcgaaccttttggcctggttgaagagggtgctaagacggcccctaccggaaagcggatagacgaccactttccaaaaagaaagaaggctcggaccgaagaggactccaagccttccacctcgtcagacgccgaagctggacccagcggatcccagcagctgcaaatcccagcccaaccagcctcaagtttgggagctgatacaatgtctgcgggaggtggcggcccattgggcgacaataaccaaggtgccgatggagtgggcaatgcctcgggagattggcattgcgattccacgtggatgggggacagagtcgtcaccaagtccacccgaacctgggtgctgcccagctacaacaaccaccagtaccgagagatcaaaagcggctccgtcgacggaagcaacgccaacgcctactttggatacagcaccccctgggggtactttgactttaaccgcttccacagccactggagcccccgagactggcaaagactcatcaacaactactggggcttcagaccccggtccctcagagtcaaaatcttcaacattcaagtcaaagaggtcacggtgcaggactccaccaccaccatcgccaacaacctcacctccaccgtcgatgtgtttacggacgacgactaccagctgccctacgtcgtcggcaacgggaccgagggatgcctgccggccttccctccgcaggtctttacgctgccgcagtacggttacgcgacgctgaaccgcgacaacacagaaaatcccaccgagaggagcagcttcttctgcctagagtactttcccagcaagatgctgagaacgggcaacaactttgagtttacctacaactttgaggaggtgcccttccactccagcttcgctcccagtcagaacctgttcaagctggccaacccgctggtggaccagtacttgtaccgcttcgtgagcacaaataacactggcggagtccagttcaacaagaacctggccgggagatacgccaacacctacaaaaactggttcccggggcccatgggccgaacccagggctggaacctgggctccggggtcaaccgcgccagtgtcagcgccttcgccacgaccaataggatggagctcgagggcgcgagttaccaggtgcccccgcagccgaacggcatgaccaacaacctccagggcagcaacacctatgccctggagaacactatgatcttcaacagccagccggcgaacccgggcaccaccgccacgtacctcgagggcaacatgctcatcaccagcgagagcgagacgcagccggtgaaccgcgtggcgtacaacgtcggcgggcagatggccaccaacaaccagagctccaccactgcccccgcgaccggcacgtacaacctccaggaaatcgtgcccggcagcgtgtggatggagagggacgtgtacctccaaggacccatctgggccaagatcccagagacgggggcgcactttcacccctctccggccatgggcggattcggactcaaacacccaccgcccatgatgctcatcaagaacacgcctgtgcccggaaatatcaccagcttctcggacgtgcccgtcagcagcttcatcacccagtacagcaccgggcaggtcaccgtggagatggagtgggagctcaagaaggaaaactccaagaggtggaacccagagatccagtacacaaacaactacaacgacccccagtttgtggactttgccccggacagcaccggggaatacagaaccaccagacctatcggaacccgataccttacccgacccctttaacccattcatgtcgcataccctcaataaa

SEQ ID NO: 2164 - protein, 724 aa, Artificial Sequence
  Description of Artificial Sequence: Synthetic polypeptide
MSFVDHPPDWLEEVGEGLREFLGLEAGPPKPKPNQQHQDQARGLVLPGYNYLGPGNGLDRGEPVNRADEVAREHDISYNEQLEAGDNPYLKYNHADAEFQEKLADDTSFGGNLGKAVFQAKKRVLEPFGLVEEGAKTAPTGKRIDDHFPKRKKARTEEDSKPSTSSDAEAGPSGSQQLQIPAQPASSLGADTMSAGGGGPLGDNNQGADGVGNASGDWHCDSTWMGDRVVTKSTRTWVLPSYNNHQYREIKSGSVDGSNANAYFGYSTPWGYFDFNRFHSHWSPRDWQRLINNYWGFRPRSLRVKIFNIQVKEVTVQDSTTTIANNLTSTVDVFTDDDYQLPYVVGNGTEGCLPAFPPQVFTLPQYGYATLNRDNTENPTERSSFFCLEYFPSKMLRTGNNFEFTYNFEEVPFHSSFAPSQNLFKLANPLVDQYLYRFVSTNNTGGVQFNKNLAGRYANTYKNWFPGPMGRTQGWNLGSGVNRASVSAFATTNRMELEGASYQVPPQPNGMTNNLQGSNTYALENTMIFNSQPANPGTTATYLEGNMLITSESETQPVNRVAYNVGGQMATNNQSSTTAPATGTYNLQEIVPGSVWMERDVYLQGPIWAKIPETGAHFHPSPAMGGFGLKHPPPMMLIKNTPVPGNITSFSDVPVSSFITQYSTGQVTVEMEWELKKENSKRWNPEIQYTNNYNDPQFVDFAPDSTGEYRTTRPIGTRYLTRPL

SEQ ID NO: 2165 - DNA, 2203 bp, Artificial Sequence
  Description of Artificial Sequence: Synthetic polynucleotide
atgtcttttgttgatcaccctccagattggttggaagaagttggtgaaggtcttcgcgagtttttgggccttgaagcgggcccaccgaaaccaaaacccaatcagcagcatcaagatcaagcccgtggtcttgtgctgcctggttataactatctcggacccggaaacggtctcgatcgaggagagcctgtcaacagggcagacgaggtcgcgcgagagcacgacatctcgtacaacgagcagcttgaggcgggagacaacccctacctcaagtacaaccacgcggacgccgagtttcaggagaagctcgccgacgacacatccttcgggggaaacctcggaaaggcagtctttcaggccaagaaaagggttctcgaaccttttggcctggttgaagagggtgctaagacggcccctaccggaaagcggatagacgaccactttccaaaaagaaagaaggctcggaccgaagaggactccaagccttccacctcgtcagacgccgaagctggacccagcggatcccagcagctgcaaatcccagcccaaccagcctcaagtttgggagctgatacaatgtctgcgggaggtggcggcccattgggcgacaataaccaaggtgccgatggagtgggcaatgcctcgggagattggcattgcgattccacgtggatgggggacagagtcgtcaccaagtccacccgaacctgggtgctgcccagctacaacaaccaccagtaccgagagatcaaaagcggctccgtcgacggaagcaacgccaacgcctactttggatacagcaccccctgggggtactttgactttaaccgcttccacagccactggagcccccgagactggcaaagactcatcaacaactactggggcttcagaccccggtccctcagagtcaaaatcttcaacattcaagtcaaagaggtcacggtgcaggactccaccaccaccatcgccaacaacctcacctccaccgtccaagtgtttacggacgacgactaccagctgccctacgtcgtcggcaacgggacccagggatgcctgccggccttccctccgcaggtctttacgctgccgcagtacggttacgcgacgctgaaccgcgacaacacagaaaatcccaccgagaggagcagcttcttctgcctagagtactttcccagcaagatgctgagaacgggcaacaactttgagtttacctacaactttgaggaggtgcccttccactccagcttcgctcccagtcagaacctgttcaagctggccaacccgctggtggaccagtacttgtaccgcttcgtgagcacaaataacactggcggagtccagttcaacaagaacctggccgggagatacgccaacacctacaaaaactggttcccggggcccatgggccgaacccagggctggaacctgggctccggggtcaaccgcgccagtgtcagcgccttcgccacgaccaataggatggagctcgagggcgcgagttaccaggtgcccccgcagccgaacggcatgaccaacaacctccagggcagcaacacctatgccctggagaacactatgatcttcaacagccagccggcgaacccgggcaccaccgccacgtacctcgagggcaacatgctcatcaccagcgagagcgagacgcagccggtgaaccgcgtggcgtacaacgtcggcgggcagatggccaccaacaaccagagctccaccactgcccccgcgaccggcacgtacaacctccaggaaatcgtgcccggcagcgtgtggatggagagggacgtgtacctccaaggacccatctgggccaagatcccagagacgggggcgcactttcacccctctccggccatgggcggattcggactcaaacacccaccgcccatgatgctcatcaagaacacgcctgtgcccggaaatatcaccagcttctcggacgtgcccgtcagcagcttcatcacccagtacagcaccgggcaggtcaccgtggagatggagtgggagctcaagaaggaaaactccaagaggtggaacccagagatccagtacacaaacaactacaacgacccccagtttgtggactttgccccggacagcaccggggaatacagaaccaccagacctatcggaacccgataccttacccgacccctttaacccattcatgtcgcataccctcaataaa

SEQ ID NO: 2166 - protein, 724 aa, Artificial Sequence
  Description of Artificial Sequence: Synthetic polypeptide
MSFVDHPPDWLEEVGEGLREFLGLEAGPPKPKPNQQHQDQARGLVLPGYNYLGPGNGLDRGEPVNRADEVAREHDISYNEQLEAGDNPYLKYNHADAEFQEKLADDTSFGGNLGKAVFQAKKRVLEPFGLVEEGAKTAPTGKRIDDHFPKRKKARTEEDSKPSTSSDAEAGPSGSQQLQIPAQPASSLGADTMSAGGGGPLGDNNQGADGVGNASGDWHCDSTWMGDRVVTKSTRTWVLPSYNNHQYREIKSGSVDGSNANAYFGYSTPWGYFDFNRFHSHWSPRDWQRLINNYWGFRPRSLRVKIFNIQVKEVTVQDSTTTIANNLTSTVQVFTDDDYQLPYVVGNGTQGCLPAFPPQVFTLPQYGYATLNRDNTENPTERSSFFCLEYFPSKMLRTGNNFEFTYNFEEVPFHSSFAPSQNLFKLANPLVDQYLYRFVSTNNTGGVQFNKNLAGRYANTYKNWFPGPMGRTQGWNLGSGVNRASVSAFATTNRMELEGASYQVPPQPNGMTNNLQGSNTYALENTMIFNSQPANPGTTATYLEGNMLITSESETQPVNRVAYNVGGQMATNNQSSTTAPATGTYNLQEIVPGSVWMERDVYLQGPIWAKIPETGAHFHPSPAMGGFGLKHPPPMMLIKNTPVPGNITSFSDVPVSSFITQYSTGQVTVEMEWELKKENSKRWNPEIQYTNNYNDPQFVDFAPDSTGEYRTTRPIGTRYLTRPL

SEQ ID NO: 2167 - DNA, 2203 bp, Artificial Sequence
  Description of Artificial Sequence: Synthetic polynucleotide
atgtcttttgttgatcaccctccagattggttggaagaagttggtgaaggtcttcgcgagtttttgggccttgaagcgggcccaccgaaaccaaaacccaatcagcagcatcaagatcaagcccgtggtcttgtgctgcctggttataactatctcggacccggaaacggtctcgatcgaggagagcctgtcaacagggcagacgaggtcgcgcgagagcacgacatctcgtacaacgagcagcttgaggcgggagacaacccctacctcaagtacaaccacgcggacgccgagtttcaggagaagctcgccgacgacacatccttcgggggaaacctcggaaaggcagtctttcaggccaagaaaagggttctcgaaccttttggcctggttgaagagggtgctaagacggcccctaccggaaagcggatagacgaccactttccaaaaagaaagaaggctcggaccgaagaggactccaagccttccacctcgtcagacgccgaagctggacccagcggatcccagcagctgcaaatcccagcccaaccagcctcaagtttgggagctgatacaatgtctgcgggaggtggcggcccattgggcgacaataaccaaggtgccgatggagtgggcaatgcctcgggagattggcattgcgattccacgtggatgggggacagagtcgtcaccaagtccacccgaacctgggtgctgcccagctacaacaaccaccagtaccgagagatcaaaagcggctccgtcgacggaagcaacgccaacgcctactttggatacagcaccccctgggggtactttgactttaaccgcttccacagccactggagcccccgagactggcaaagactcatcaacaactactggggcttcagaccccggtccctcagagtcaaaatcttcaacattcaagtcaaagaggtcacggtgcaggactccaccaccaccatcgccaacaacctcacctccaccgtccaagtgtttacggacgacgactaccagctgccctacgtcgtcggcaacgggaccgagggatgcctgccggccttccctccgcaggtctttacgctgccgcagtacggttacgcgacgctgaaccgcgacaacacagaaaatcccaccgagaggagcagcttcttctgcctagagtactttcccagcaagatgctgagaacgggcaacaactttgagtttacctacaactttgaggaggtgcccttccactccagcttcgctcccagtcagaacctgttcaagctggccaacccgctggtggaccagtacttgtaccgcttcgtgagcacaaataacactggcggagtccagttcaacaagaacctggccgggagatacgccaacacctacaaaaactggttcccggggcccatgggccgaacccagggctggaacctgggctccggggtcaaccgcgccagtgtcagcgccttcgccacgaccaataggatggagctcgagggcgcgagttaccaggtgcccccgcagccgaacggcatgaccaacaacctccagggcagcaacacctatgccctggagaacactatgatcttcaacagccagtcggcgaacccgggcaccaccgccacgtacctcgagggcaacatgctcatcaccagcgagagcgagacgcagccggtgaaccgcgtggcgtacaacgtcggcgggcagatggccaccaacaaccagagctccaccactgcccccgcgaccggcacgtacaacctccaggaaatcgtgcccggcagcgtgtggatggagagggacgtgtacctccaaggacccatctgggccaagatcccagagacgggggcgcactttcacccctctccggccatgggcggattcggactcaaacacccaccgcccatgatgctcatcaagaacacgcctgtgcccggaaatatcaccagcttctcggacgtgcccgtcagcagcttcatcacccagtacagcaccgggcaggtcaccgtggagatggagtgggagctcaagaaggaaaactccaagaggtggaacccagagatccagtacacaaacaactacaacgacccccagtttgtggactttgccccggacagcaccggggaatacagaaccaccagacctatcggaacccgataccttacccgacccctttaacccattcatgtcgcataccctcaataaa

SEQ ID NO: 2168 - protein, 724 aa, Artificial Sequence
  Description of Artificial Sequence: Synthetic polypeptide
MSFVDHPPDWLEEVGEGLREFLGLEAGPPKPKPNQQHQDQARGLVLPGYNYLGPGNGLDRGEPVNRADEVAREHDISYNEQLEAGDNPYLKYNHADAEFQEKLADDTSFGGNLGKAVFQAKKRVLEPFGLVEEGAKTAPTGKRIDDHFPKRKKARTEEDSKPSTSSDAEAGPSGSQQLQIPAQPASSLGADTMSAGGGGPLGDNNQGADGVGNASGDWHCDSTWMGDRVVTKSTRTWVLPSYNNHQYREIKSGSVDGSNANAYFGYSTPWGYFDFNRFHSHWSPRDWQRLINNYWGFRPRSLRVKIFNIQVKEVTVQDSTTTIANNLTSTVQVFTDDDYQLPYVVGNGTEGCLPAFPPQVFTLPQYGYATLNRDNTENPTERSSFFCLEYFPSKMLRTGNNFEFTYNFEEVPFHSSFAPSQNLFKLANPLVDQYLYRFVSTNNTGGVQFNKNLAGRYANTYKNWFPGPMGRTQGWNLGSGVNRASVSAFATTNRMELEGASYQVPPQPNGMTNNLQGSNTYALENTMIFNSQSANPGTTATYLEGNMLITSESETQPVNRVAYNVGGQMATNNQSSTTAPATGTYNLQEIVPGSVWMERDVYLQGPIWAKIPETGAHFHPSPAMGGFGLKHPPPMMLIKNTPVPGNITSFSDVPVSSFITQYSTGQVTVEMEWELKKENSKRWNPEIQYTNNYNDPQFVDFAPDSTGEYRTTRPIGTRYLTRPL

SEQ ID NO: 2169 - DNA, 2203 bp, Artificial Sequence
  Description of Artificial Sequence: Synthetic polynucleotide
atgtcttttgttgatcaccctccagattggttggaagaagttggtgaaggtcttcgcgagtttttgggccttgaagcgggcccaccgaaaccaaaacccaatcagcagcatcaagatcaagcccgtggtcttgtgctgcctggttataactatctcggacccggaaacggtctcgatcgaggagagcctgtcaacagggcagacgaggtcgcgcgagagcacgacatctcgtacaacgagcagcttgaggcgggagacaacccctacctcaagtacaaccacgcggacgccgagtttcaggagaagctcgccgacgacacatccttcgggggaaacctcggaaaggcagtctttcaggccaagaaaagggttctcgaaccttttggcctggttgaagagggtgctaagacggcccctaccggaaagcggatagacgaccactttccaaaaagaaagaaggctcggaccgaagaggactccaagccttccacctcgtcagacgccgaagctggacccagcggatcccagcagctgcaaatcccagcccaaccagcctcaagtttgggagctgatacaatgtctgcgggaggtggcggcccattgggcgacaataaccaaggtgccgatggagtgggcaatgcctcgggagattggcattgcgattccacgtggatgggggacagagtcgtcaccaagtccacccgaacctgggtgctgcccagctacaacaaccaccagtaccgagagatcaaaagcggctccgtcgacggaagcaacgccaacgcctactttggatacagcaccccctgggggtactttgactttaaccgcttccacagccactggagcccccgagactggcaaagactcatcaacaactactggggcttcagaccccggtccctcagagtcaaaatcttcaacattcaagtcaaagaggtcacggtgcaggactccaccaccaccatcgccaacaacctcacctccaccgtccaagtgtttacggacgacgactaccagctgccctacgtcgtcggcaacgggaccgagggatgcctgccggccttccctccgcaggtctttacgctgccgcagtacggttacgcgacgctgaaccgcgacaacacagaaaatcccaccgagaggagcagcttcttctgcctagagtactttcccagcaagatgctgagaacgggcaacaactttgagtttacctacaactttgaggaggtgcccttccactccagcttcgctcccagtcagaacctgttcaagctggccaacccgctggtggaccagtacttgtaccgcttcgtgagcacaaataacactggcggagtccagttcaacaagaacctggccgggagatacgccaacacctacaaaaactggttcccggggcccatgggccgaacccagggctggaacctgggctccggggtcaaccgcgccagtgtcagcgccttcgccacgaccaataggatggagctcgagggcgcgagttaccaggtgcccccgcagccgaacggcatgaccaacaacctccagggcagcaacacctatgccctggagaacactatgatcttcaacagccagggggcgaacccgggcaccaccgccacgtacctcgagggcaacatgctcatcaccagcgagagcgagacgcagccggtgaaccgcgtggcgtacaacgtcggcgggcagatggccaccaacaaccagagctccaccactgcccccgcgaccggcacgtacaacctccaggaaatcgtgcccggcagcgtgtggatggagagggacgtgtacctccaaggacccatctgggccaagatcccagagacgggggcgcactttcacccctctccggccatgggcggattcggactcaaacacccaccgcccatgatgctcatcaagaacacgcctgtgcccggaaatatcaccagcttctcggacgtgcccgtcagcagcttcatcacccagtacagcaccgggcaggtcaccgtggagatggagtgggagctcaagaaggaaaactccaagaggtggaacccagagatccagtacacaaacaactacaacgacccccagtttgtggactttgccccggacagcaccggggaatacagaaccaccagacctatcggaacccgataccttacccgacccctttaacccattcatgtcgcataccctcaataaa

SEQ ID NO: 2170 - protein, 724 aa, Artificial Sequence
  Description of Artificial Sequence: Synthetic polypeptide
MSFVDHPPDWLEEVGEGLREFLGLEAGPPKPKPNQQHQDQARGLVLPGYNYLGPGNGLDRGEPVNRADEVAREHDISYNEQLEAGDNPYLKYNHADAEFQEKLADDTSFGGNLGKAVFQAKKRVLEPFGLVEEGAKTAPTGKRIDDHFPKRKKARTEEDSKPSTSSDAEAGPSGSQQLQIPAQPASSLGADTMSAGGGGPLGDNNQGADGVGNASGDWHCDSTWMGDRVVTKSTRTWVLPSYNNHQYREIKSGSVDGSNANAYFGYSTPWGYFDFNRFHSHWSPRDWQRLINNYWGFRPRSLRVKIFNIQVKEVTVQDSTTTIANNLTSTVQVFTDDDYQLPYVVGNGTEGCLPAFPPQVFTLPQYGYATLNRDNTENPTERSSFFCLEYFPSKMLRTGNNFEFTYNFEEVPFHSSFAPSQNLFKLANPLVDQYLYRFVSTNNTGGVQFNKNLAGRYANTYKNWFPGPMGRTQGWNLGSGVNRASVSAFATTNRMELEGASYQVPPQPNGMTNNLQGSNTYALENTMIFNSQGANPGTTATYLEGNMLITSESETQPVNRVAYNVGGQMATNNQSSTTAPATGTYNLQEIVPGSVWMERDVYLQGPIWAKIPETGAHFHPSPAMGGFGLKHPPPMMLIKNTPVPGNITSFSDVPVSSFITQYSTGQVTVEMEWELKKENSKRWNPEIQYTNNYNDPQFVDFAPDSTGEYRTTRPIGTRYLTRPL

SEQ ID NO: 2171 - DNA, 2194 bp, Artificial Sequence
  Description of Artificial Sequence: Synthetic polynucleotide
atgtcttttgttgatcaccctccagattggttggaagaagttggtgaaggtcttcgcgagtttttgggccttgaagcgggcccaccgaaaccaaaacccaatcagcagcatcaagatcaagcccgtggtcttgtgctgcctggttataactatctcggacccggaaacggtctcgatcgaggagagcctgtcaacagggcagacgaggtcgcgcgagagcacgacatctcgtacaacgagcagcttgaggcgggagacaacccctacctcaagtacaaccacgcggacgccgagtttcaggagaagctcgccgacgacacatccttcgggggaaacctcggaaaggcagtctttcaggccaagaaaagggttctcgaaccttttggcctggttgaagagggtgctaagacggcccctaccggaaagcggatagacgaccactttccaaaaagaaagaaggctcggaccgaagaggactccaagccttccacctcgtcagacgccgaagctggacccagcggatcccagcagctgcaaatcccagcccaaccagcctcaagtttgggagctgatacaatgtctgcgggaggtggcggcccattgggcgacaataaccaaggtgccgatggagtgggcaatgcctcgggagattggcattgcgattccacgtggatgggggacagagtcgtcaccaagtccacccgaacctgggtgctgcccagctacaacaaccaccagtaccgagagatcaaaagcggctccgtcgacggaagcaacgccaacgcctactttggatacagcaccccctgggggtactttgactttaaccgcttccacagccactggagcccccgagactggcaaagactcatcaacaactactggggcttcagaccccggtccctcagagtcaaaatcttcaacattcaagtcaaagaggtcacggtgcaggactccaccaccaccatcgccaacaacctcacctccaccgtccaagtgtttacggacgacgactaccagctgccctacgtcgtcggcaacgggaccgagggatgcctgccggccttccctccgcaggtctttacgctgccgcagtacggttacgcgacgctgaaccgcgacaacacagaaaatcccaccgagaggagcagcttcttctgcctagagtactttcccagcaagatgctgagaacgggcaacaactttgagtttacctacaactttgaggaggtgcccttccactccagcttcgctcccagtcagaacctgttcaagctggccaacccgctggtggaccagtacttgtaccgcttcgtgagcacaaataacactggcggagtccagttcaacaagaacctggccgggagatacgccaacacctacaaaaactggttcccggggcccatgggccgaacccagggctggaacctgggctccggggtcaaccgcgccagtgtcagcgccttcgccacgaccaataggatggagctcgagggcgcgagttaccaggtgcccccgcagccgaacggcatgaccaacaacctccagggcagcaacacctatgccctggagaacactatgatcttcgggaagcaaggctcagagaaaacaaatgtggacattgaaaaggtcatgatcaccagcgagagcgagacgcagccggtgaaccgcgtggcgtacaacgtcggcgggcagatggccaccaacaaccagagctccaccactgcccccgcgaccggcacgtacaacctccaggaaatcgtgcccggcagcgtgtggatggagagggacgtgtacctccaaggacccatctgggccaagatcccagagacgggggcgcactttcacccctctccggccatgggcggattcggactcaaacacccaccgcccatgatgctcatcaagaacacgcctgtgcccggaaatatcaccagcttctcggacgtgcccgtcagcagcttcatcacccagtacagcaccgggcaggtcaccgtggagatggagtgggagctcaagaaggaaaactccaagaggtggaacccagagatccagtacacaaacaactacaacgacccccagtttgtggactttgccccggacagcaccggggaatacagaaccaccagacctatcggaacccgataccttacccgacccctttaacccattcatgtcgcataccctcaataaa

SEQ ID NO: 2172 - protein, 721 aa, Artificial Sequence
  Description of Artificial Sequence: Synthetic polypeptide
MSFVDHPPDWLEEVGEGLREFLGLEAGPPKPKPNQQHQDQARGLVLPGYNYLGPGNGLDRGEPVNRADEVAREHDISYNEQLEAGDNPYLKYNHADAEFQEKLADDTSFGGNLGKAVFQAKKRVLEPFGLVEEGAKTAPTGKRIDDHFPKRKKARTEEDSKPSTSSDAEAGPSGSQQLQIPAQPASSLGADTMSAGGGGPLGDNNQGADGVGNASGDWHCDSTWMGDRVVTKSTRTWVLPSYNNHQYREIKSGSVDGSNANAYFGYSTPWGYFDFNRFHSHWSPRDWQRLINNYWGFRPRSLRVKIFNIQVKEVTVQDSTTTIANNLTSTVQVFTDDDYQLPYVVGNGTEGCLPAFPPQVFTLPQYGYATLNRDNTENPTERSSFFCLEYFPSKMLRTGNNFEFTYNFEEVPFHSSFAPSQNLFKLANPLVDQYLYRFVSTNNTGGVQFNKNLAGRYANTYKNWFPGPMGRTQGWNLGSGVNRASVSAFATTNRMELEGASYQVPPQPNGMTNNLQGSNTYALENTMIFGKQGSEKTNVDIEKVMITSESETQPVNRVAYNVGGQMATNNQSSTTAPATGTYNLQEIVPGSVWMERDVYLQGPIWAKIPETGAHFHPSPAMGGFGLKHPPPMMLIKNTPVPGNITSFSDVPVSSFITQYSTGQVTVEMEWELKKENSKRWNPEIQYTNNYNDPQFVDFAPDSTGEYRTTRPIGTRYLTRPL

SEQ ID NO: 2173 - protein, 519 aa, Artificial Sequence
  Description of Artificial Sequence: Synthetic polypeptide
DGVGSSSGNWHCDSTWLGDRVITTSTRTWALPTYNNHLYKQISNGTSGGATNDNTYFGYSTPWGYFDFNRFHCHFSPRDWQRLINNNWGFRPKRLSFKLFNIQVKEVTQNEGTKTIANNLTSTIQVFTDSEYQLPYVLGSAHQGCLPPFPADVFMIPQYGYLTLNNGSQAVGRSSFYCLEYFPSQMLRTGNNFQFTYTFEDVPFHSSYAHSQSLDRLMNPLIDQYLYYLSRTQTTGGTANTQTLGFSQGGPNTMANQAKNWLPGPCYRQQRVSTTTGQNNNSNFAWTAGTKYHLNGRNSLANPGIAMATHKDDEERFFPSNGILIFGKQNAARDNADYSDVMLTSEEEIKTTNPVATEEYGIVADNLQQQNTAPQIGTVNSQGALPGMVWQNRDVYLQGPIWAKIPHTDGNFHPSPLMGGFGLKHPPPQILIKNTPVPADPPTTFNQSKLNSFITQYSTGQVSVEIEWELQKENSKRWNPEIQYTSNYYKSTSVDFAVNTEGVYSEPRPIGTRYLTRNL

SEQ ID NO: 2174 - protein, 738 aa, Artificial Sequence
  Description of Artificial Sequence: Synthetic polypeptide
MAADGYLPDWLEDNLSEGIREWWALQPGAPKPKANQQHQDNARGLVLPGYKYLGPGNGLDKGEPVNAADAAALEHDKAYDQQLKAGDNPYLKYNHADAEFQERLKEDTSFGGNLGRAVFQAKKRLLEPLGLVEEAAKTAPGKKRPVEPSPQRSPDSSTGIGKKGQQPARKRLNFGQTGDSESVPDPQPLGEPPAAPSGVGPNTMAAGGGAPMADNNEGADGVGSSSGNWHCDSTWLGDRVITTSTRTWALPTYNNHLYKQISNGTSGGATNDNTYFGYSTPWGYFDFNRFHCHFSPRDWQRLINNNWGFRPKRLSFKLFNIQVKEVTQNEGTKTIANNLTSTIQVFTDSEYQLPYVLGSAHQGCLPPFPADVFMIPQYGYLTLNNGSQAVGRSSFYCLEYFPSQMLRTGNNFQFTYTFEDVPFHSSYAHSQSLDRLMNPLIDQYLYYLSRTQTTGGTANTQTLGFSQGGPNTMANQAKNWLPGPCYRQQRVSTTTGQNNNSNFAWTAGTKYHLNGRNSLANPGIAMATHKDDEERFFPSNGILIFGKQNAARDNADYSDVMLTSEEEIKTTNPVATEEYGIVADNLQQQNTAPQIGTVNSQGALPGMVWQNRDVYLQGPIWAKIPHTDGNFHPSPLMGGFGLKHPPPQILIKNTPVPADPPTTFNQSKLNSFITQYSTGQVSVEIEWELQKENSKRWNPEIQYTSNYYKSTSVDFAVNTEGVYSEPRPIGTRYLTRNL

SEQ ID NO: 2175 - protein, 725 aa, Artificial Sequence
  Description of Artificial Sequence: Synthetic polypeptide
MAADGYLPDWLEDNLSEGIREWWALQPGAPKPKANQQHQDNARGLVLPGYKYLGPGNGLDKGEPVNAADAAALEHDKAYDQQLKAGDNPYLKYNHADAEFQERLKEDTSFGGNLGRAVFQAKKRLLEPLGLVEEAAKTAPTGKRIDDHFPKRKKARTEEDSKPSTSSDAEAGPSGSQQLQIPAQPASSLGADTMSAGGGGPLGDNNQGADGVGNASGDWHCDSTWMGDRVVTKSTRTWVLPSYNNHQYREIKSGSVDGSNANAYFGYSTPWGYFDFNRFHSHWSPRDWQRLINNYWGFRPRSLRVKIFNIQVKEVTVQDSTTTIANNLTSTVQVFTDDDYQLPYVVGNGTEGCLPAFPPQVFTLPQYGYATLNRDNTENPTERSSFFCLEYFPSKMLRTGNNFEFTYNFEEVPFHSSFAPSQNLFKLANPLVDQYLYRFVSTNNTGGVQFNKNLAGRYANTYKNWFPGPMGRTQGWNLGSGVNRASVSAFATTNRMELEGASYQVPPQPNGMTNNLQGSNTYALENTMIFNSQPANPGTTATYLEGNMLITSESETQPVNRVAYNVGGQMATNNQSSTTAPATGTYNLQEIVPGSVWMERDVYLQGPIWAKIPETGAHFHPSPAMGGFGLKHPPPMMLIKNTPVPGNITSFSDVPVSSFITQYSTGQVTVEMEWELKKENSKRWNPEIQYTNNYNDPQFVDFAPDSTGEYRTTRPIGTRYLTRPL

SEQ ID NO: 2176 - protein, 736 aa, Artificial Sequence
  Description of Artificial Sequence: Synthetic polypeptide
MAADGYLPDWLEDNLSEGIREWWALKPGAPKPKANQQKQDDGRGLVLPGYKYLGPFNGLDKGEPVNAADAAALEHDKAYDQQLQAGDNPYLRYNHADAEFQERLQEDTSFGGNLGRAVFQAKKRVLEPLGLVEEGAKTAPGKKRPVDQSPQEPDSSSGVGKSGKQPARKRLNFGQTGDSESVPDPQPLGEPPAAPTSLGSNTMASGGGAPMADNNEGADGVGNSSGNWHCDSQWLGDRVITTSTRTWALPTYNNHLYKQISSQSGASNDNHYFGYSTPWGYFDFNRFHCHFSPRDWQRLINNNWGFRPKKLSFKLFNIQVKEVTQNDGTTTIANNLTSTVQVFTDSEYQLPYVLGSAHQGCLPPFPADVFMVPQYGYLTLNNGSQAVGRSSFYCLEYFPSQMLRTGNNFQFSYTFEDVPFHSSYAHSQSLDRLMNPLIDQYLYYLNRTQGTTSGTTNQSRLLFSQAGPQSMSLQARNWLPGPCYRQQRLSKTANDNNNSNFPWTAASKYHLNGRDSLVNPGPAMASHKDDEEKFFPMHGNLIFGKEGTTASNAELDNVMITDEEEIRTTNPVATEQYGTVANNLQSSNTAPTTRTVNDQGALPGMVWQDRDVYLQGPIWAKIPHTDGHFHPSPLMGGFGLKHPPPQIMIKNTPVPANPPTTFSPAKFASFITQYSTGQVSVEIEWELQKENSKRWNPEIQYTSNYNKSVNVDFTVDTNGVYSEPRPIGTRYLTRNL

SEQ ID NO: 2177 - protein, 735 aa, Artificial Sequence
  Description of Artificial Sequence: Synthetic polypeptide
MSFVDHPPDWLEEVGEGLREFLGLEAGPPKPKPNQQHQDQARGLVLPGYNYLGPGNGLDRGEPVNRADEVAREHDISYNEQLEAGDNPYLKYNHADAEFQEKLADDTSFGGNLGKAVFQAKKRVLEPFGLVEEGAKTAPGKKRPVDQSPQEPDSSSGVGKSGKQPARKRLNFGQTGDSESVPDPQPLGEPPAAPTSLGSNTMASGGGAPMADNNEGADGVGNSSGNWHCDSQWLGDRVITTSTRTWALPTYNNHLYKQISSQSGASNDNHYFGYSTPWGYFDFNRFHCHFSPRDWQRLINNNWGFRPKKLSFKLFNIQVKEVTQNDGTTTIANNLTSTVQVFTDSEYQLPYVLGSAHQGCLPPFPADVFMVPQYGYLTLNNGSQAVGRSSFYCLEYFPSQMLRTGNNFQFSYTFEDVPFHSSYAHSQSLDRLMNPLIDQYLYYLNRTQGTTSGTTNQSRLLFSQAGPQSMSLQARNWLPGPCYRQQRLSKTANDNNNSNFPWTAASKYHLNGRDSLVNPGPAMASHKDDEEKFFPMHGNLIFGKEGTTASNAELDNVMITDEEEIRTTNPVATEQYGTVANNLQSSNTAPTTRTVNDQGALPGMVWQDRDVYLQGPIWAKIPHTDGHFHPSPLMGGFGLKHPPPQIMIKNTPVPANPPTTFSPAKFASFITQYSTGQVSVEIEWELQKENSKRWNPEIQYTSNYNKSVNVDFTVDTNGVYSEPRPIGTRYLTRPL

SEQ ID NO: 2178 - protein, 736 aa, Artificial Sequence
  Description of Artificial Sequence: Synthetic polypeptide
MAADGYLPDWLEDNLSEGIREWWALKPGAPKPKANQQKQDDGRGLVLPGYKYLGPFNGLDKGEPVNAADAAALEHDKAYDQQLQAGDNPYLRYNHADAEFQERLQEDTSFGGNLGRAVFQAKKRVLEPLGLVEEGAKTAPGKKRPVEPSPQRSPDSSTGIGKKGQQPARKRLNFGQTGDSESVPDPQPLGEPPAAPSGVGPNTMAAGGGAPMADNNEGADGVGSSSGNWHCDSTWLGDRVITTSTRTWALPTYNNHLYKQISSQSGASNDNHYFGYSTPWGYFDFNRFHCHFSPRDWQRLINNNWGFRPKRLSFKLFNIQVKEVTQNEGTKTIANNLTSTIQVFTDSEYQLPYVLGSAHQGCLPPFPADVFMIPQYGYLTLNNGSQAVGRSSFYCLEYFPSQMLRTGNNFQFTYTFEDVPFHSSYAHSQSLDRLMNPLIDQYLYYLSRTQTTGGTANTQTLGFSQGGPNTMANQAKNWLPGPCYRQQRVSTTTGQNNNSNFAWTAGTKYHLNGRNSLANPGIAMATHKDDEERFFPSNGILIFGKQGTTASNAELDNVMITDEEEIKTTNPVATEEYGIVADNLQQQNTAPQIGTVNSQGALPGMVWQNRDVYLQGPIWAKIPHTDGNFHPSPLMGGFGLKHPPPQILIKNTPVPADPPTTFNQSKLNSFITQYSTGQVSVEIEWELQKENSKRWNPEIQYTSNYNKSVNVDFTVDTNGVYSEPRPIGTRYLTRNL

SEQ ID NO: 2179 - protein, 736 aa, Artificial Sequence
  Description of Artificial Sequence: Synthetic polypeptide
MAADGYLPDWLEDNLSEGIREWWALKPGAPKPKANQQKQDDGRGLVLPGYKYLGPFNGLDKGEPVNAADAAALEHDKAYDQQLQAGDNPYLRYNHADAEFQERLQEDTSFGGNLGRAVFQAKKRVLEPLGLVEEGAKTAPGKKRPVEPSPQRSPDSSTGIGKKGQQPARKRLNFGQTGDSESVPDPQPLGEPPAAPSGVGPNTMAAGGGAPMADNNEGADGVGSSSGNWHCDSTWLGDRVITTSTRTWALPTYNNHLYKQISSQSGASNDNHYFGYSTPWGYFDFNRFHCHFSPRDWQRLINNNWGFRPKRLSFKLFNIQVKEVTQNEGTKTIANNLTSTIQVFTDSEYQLPYVLGSAHQGCLPPFPADVFMIPQYGYLTLNNGSQAVGRSSFYCLEYFPSQMLRTGNNFQFTYTFEDVPFHSSYAHSQSLDRLMNPLIDQYLYYLSRTQTTGGTANTQTLGFSQGGPNTMANQAKNWLPGPCYRQQRVSTTTGQNNNSNFAWTAGTKYHLNGRNSLANPGIAMATHKDDEERFFPSNGILIFGKQNAARDNADYSDVMLTSEEEIKTTNPVATEEYGIVADNLQQQNTAPQIGTVNSQGALPGMVWQNRDVYLQGPIWAKIPHTDGNFHPSPLMGGFGLKHPPPQILIKNTPVPADPPTTFNQSKLNSFITQYSTGQVSVEIEWELQKENSKRWNPEIQYTSNYYKSTSVDFAVNTEGVYSEPRPIGTRYLTRNL

SEQ ID NO: 2180 - protein, 736 aa, Artificial Sequence
  Description of Artificial Sequence: Synthetic polypeptide
MAADGYLPDWLEDNLSEGIREWWDLKPGAPKPKANQQKQDDGRGLVLPGYKYLGPFNGLDKGEPVNAADAAALEHDKAYDQQLKAGDNPYLRYNHADAEFQERLQEDTSFGGNLGRAVFQAKKRVLEPLGLVEEGAKTAPGKKRPVEQSPQEPDSSSGIGKTGQQPAKKRLNFGQTGDTESVPDPQPLGEPPAAPSGLGPNTMASGGGAPMADNNEGADGVGNSSGNWHCDSTWLGDRVITTSTRTWALPTYNNHLYKQISNGTSGGSTNDNTYFGYSTPWGYFDFNRFHCHFSPRDWQRLINNNWGFRPKRLNFKLFNIQVKEVTTNEGTKTIANNLTSTVQVFTDSEYQLPYVLGSAHQGCLPPFPADVFMVPQYGYLTLNNGSQALGRSSFYCLEYFPSQMLRTGNNFQFSYTFEDVPFHSSYAHSQSLDRLMNPLIDQYLYYLVRTQTTGTGGTQTLAFSQAGPSSMASQARNWVPGPSYRQQRVSTTTNQNNNSNFAWTGAAKFKLNGRDSLMNPGVAMASHKDDEDRFFPSSGVLIFGKQGAGNDGVDYSQVLITDEEEIKATNPVATEEYGAVAINNQAANTQAQTGLVHNQGVIPGMVWQNRDVYLQGPIWAKIPHTDGNFHPSPLMGGFGLKHPPPQILIKNTPVPADPPLTFNQAKLNSFITQYSTGQVSVEIEWELQKENSKRWNPEIQYTSNYYKSTNVDFAVNTEGVYSEPRPIGTRYLTRNL

SEQ ID NO: 2181 - DNA, 3695 bp, Artificial Sequence
  Description of Artificial Sequence: Synthetic polynucleotide
ctctttgcgcttgcgttttcccttgtccagatagcccagtagctgacattcatccggggtcagcaccgtttctgcggactggctttctacgtgaaaaggatctaggtgaagatcctttttgataatctcatgcctgacatttatattccccagaacatcaggttaatggcgtttttgatgtcattttcgcggtggctgagatcagccacttcttccccgataacggagaccggcacactggccatatcggtggtcatcatgcgccagctttcatccccgatatgcaccaccgggtaaagttcacgggagactttatctgacagcagacgtgcactggccagggggatcaccatccgtcgccccggcgtgtcaataatatcactctgtacatccacaaacagacgataacggctctctcttttataggtgtaaaccttaaactgccgtacgtataggctgcgcaactgttgggaagggcgatcggtgcgggcctcttcgctattacgccagctggcgaaagggggatgtgctgcaaggcgattaagttgggtaacgccagggttttcccagtcacgacgttgtaaaacgacggccagtgaattgtaatacgactcactatagggcgaattgaatttagcggccgcgaattcgcccttatgatatctggtgggaggagggcaagatgacggccaaggtcgtggagtccgccaaggccattctcggcggcagcaaagtgcgcgtggaccaaaagtgcaagtcgtccgcccagatcgatcccactcccgtcattgtcacctccaacaccaacatgtgcgccgtgattgacgggaacagcaccaccttcgagcaccagcagccgttgcaggaccggatgttcaaatttgaacttacccgccgtctggagcatgactttggcaaggtgacaaagcaggaagtcaaagagttcttccgctgggcgcaggatcacgtgaccgaggtggcgcatgagttccacgtcagaaagggtggagccaacaagagacccgcccccgatgacgctgataaaagcgagcccaagcgggcctgcccctcagtcgcagatccatcgacgtcagacgcggaaggagctccggtggactttgccgacaggtaccaaaacaaatgttctcgtcacgcgggcatgcttcagatgctgtttccctgcaagacatgcgagagaatgaatcagaatttcaacatttgcttcacgcacgggaccagggactgttcggagtgcttccccggcgtgtcagaatctcaaccggtcgtcagaaaaaggacgtatcggaaactctgtgccattcatcatctgctggggagggctcccgagattgcttgctcggcctgcgatctggtcaacgtggacctggatgactgtgtctctgagcaataaatgacttaaaccaggtatggctgccgatggttatcttccagattggctcgaggacaacctctctgagggcattcgcgagtggtgggacttgaaacctggagccccgaaacccaaagccaaccagcaaaagcaggacgacggccggggtctggtgcttcctggctacaagtacctcggacccttcaacggactcgacaagggggagcccgtcaacgcggcggacgcagcggccctcgagcacgacaaggcctacgaccagcagctcaaagcgggtgacaatccgtacctgcggtataaccacgccgacgccgagtttcaggagcgtctgcaagaagatacgtcttttgggggcaacctcgggcgagcagtcttccaggccaagaagcgggttctcgaacctctcggtctggttgaggaaggcgctaagacggctcctggaaagaagagaccggtagagcagtcaccccaagaaccagactcctcatcgggcatcggcaagacaggccagcagcccgctaaaaagagactcaattttggtcagactggcgacacagagtcagtccccgacccacaacctctcggagaacctccagcagccccctcaggtctgggacctaatacaatggcttcaggcggtggcgctccaatggcagacaataacgaaggcgccgacggagtgggtaattcctcgggaaattggcattgcgattccacatggctgggggacagagtcatcaccaccagcacccgaacctgggccctgcccacctacaacaaccacctctacaagcaaatctccaacggcacctcgggaggaagcaccaacgacaacacctactttggctacagcaccccctgggggtattttgacttcaacagattccactgccacttttcaccacgtgactggcagcgactcatcaacaacaattggggattccggcccaagagactcaacttcaagctcttcaacatccaggtcaaggaagtcacgacgaacgaaggcaccaagaccatcgccaataatctcaccagcaccgtgcaggtctttacggactcggagtaccagctaccgtacgtgctaggatcagctcaccagggatgtctgcctccgttcccggcggacgtcttcatggttcctcagtacggttatctaactctgaacaatggcagccaggccctgggacgttcctccttctactgcctggagtatttcccatcgcagatgctgagaaccggcaacaactttcagttcagctacaccttcgaggacgtgcctttccacagcagctacgcgcacagccaaagcctggacaggctgatgaatcccctcatcgaccagtacctgtattacctggtcagaacgcagacaaccgggactggagggacgcagactctggcattcagccaagcaggccctagctcaatggccagccaggctagaaactgggtgcccggaccgagctaccggcagcagcgcgtctccacgacaaccaaccagaacaacaacagcaactttgcctggacgggagctgccaaatttaaactgaacggccgagactctctaatgaaccccggcgtggccatggcttcacacaaggatgacgaggaccgcttcttcccttctagcggggtcctgattttcggcaagcaaggagccgggaatgatggagtggattacagccaagtgctgattacagatgaggaagaaatcaaggctaccaaccccgtggcaacagaggaatatggagcagtggccatcaacaaccaggccgctaatacgcaggcgcagaccggactcgtgcacaaccagggggtgattcccggcatggtgtggcagaacagagacgtgtacctgcagggtcccatctgggccaaaattcctcacacggacggcaactttcacccgtctcccctgatgggcggctttggactgaagcacccgcctcctcaaattctcatcaagaacacaccggttccagcggacccgccgcttaccttcaaccaggccaagctgaactctttcatcacgcagtacagcaccggacaggtcagcgtggaaatcgagtgggagctgcagaaagaaaacagcaaacgctggaatccagagattcagtacacttccaactactacaaatctacaaatgtggactttgctgtcaacacggaaggagtgtatagcgagcctcgccccattggcacccgttacctcacccgcaacctgtaattgcctgttaatcaataaaccggttaattcgtttcagtaaggaagaattcgtttaaa

SEQ ID NO: 2182 - protein, 736 aa, Artificial Sequence; identical to SEQ ID NO: 507
  Description of Artificial Sequence: Synthetic polypeptide

SEQ ID NO: 2183 - protein, 736 aa, Artificial Sequence
  Description of Artificial Sequence: Synthetic polypeptide
MAADGYLPDWLEDNLSEGIREWWDLKPGAPKPKANQQKQDDGRGLVLPGYKYLGPFNGLDKGEPVNAADAAALEHDKAYDQQLKAGDNPYLRYNHADAEFQERLQEDTSFGGNLGRAVFQAKKRVLEPLGLVEEGAKTAPGKKRPVEQSPQEPDSSSGIGKTGQQPAKKRLNFGQTGDTESVPDPQPLGEPPAAPSGLGPNTMASGGGAPMADNNEGADGVGNSSGNWHCDSTWLGDRVITTSTRTWALPTYNNHLYKQISNGTSGGSTNDNTYFGYSTPWGYFDFNRFHCHFSPRDWQRLINNNWGFRPKRLNFKLFNIQVKEVTTNEGTKTIANNLTSTVQVFTDSEYQLPYVLGSAHQGCLPPFPADVFMVPQYGYLTLNNGSQALGRSSFYCLEYFPSQMLRTGNNFQFSYTFEDVPFHSSYAHSQSLDRLMNPLIDQYLYYLVRTQTTGTGGTQTLAFSQAGPSNMASQARNWVPGPSYRQQRVSTTTNQNNNSNFAWTGAAKFKLNGRDSLMNPGVAMASHKDDEDRFFPSSGVLIFGKQGAGNDGVDYSQVLITDEEEIKATNPVATEEYGAVAINNQAANTQAQTGLVHNQGVIPGMVWQNRDVYLQGPIWAKIPHTDGNFHPSPLMGGFGLKHPPPQILIKNTPVPADPPLTFNQAKLNSFITQYSTGQVSVEIEWELQKENSKRWNPEIQYTSNYYKSTNVDFAVNTEGVYSEPRPIGTRYLTRNL

SEQ ID NO: 2184 - protein, 738 aa, Artificial Sequence; identical to SEQ ID NO: 1878
  Description of Artificial Sequence: Synthetic polypeptide

SEQ ID NO: 2185 - protein, 736 aa, Artificial Sequence
  Description of Artificial Sequence: Synthetic polypeptide
MAADGYLPDWLEDNLSEGIREWWALQPGAPKPKANQQHQDNARGLVLPGYKYLGPGNGLDKGEPVNAADAAALEHDKAYDQQLKAGDNPYLKYNHADAEFQERLKEDTSFGGNLGRAVFQAKKRILEPLGLVEEAAKTAPGKKRPVDQSPQEPDSSSGVGKSGKQPARKRLNFGQTGDSESVPDPQPLGEPPAAPTSLGSNTMASGGGAPMADNNEGADGVGNSSGNWHCDSQWLGDRVITTSTRTWALPTYNNHLYKQISSQSGASNDNHYFGYSTPWGYFDFNRFHCHFSPRDWQRLINNNWGFRPKKLSFKLFNIQVKEVTQNDGTTTIANNLTSTVQVFTDSEYQLPYVLGSAHQGCLPPFPADVFMVPQYGYLTLNNGSQAVGRSSFYCLEYFPSQMLRTGNNFQFSYTFEDVPFHSSYAHSQSLDRLMNPLIDQYLYYLNRTQGTTSGTTNQSRLLFSQAGPQSMSLQARNWLPGPCYRQQRLSKTANDNNNSNFPWTAASKYHLNGRDSLVNPGPAMASHKDDEEKFFPMHGNLIFGKEGTTASNAELDNVMITDEEEIRTTNPVATEQYGTVANNLQSSNTAPTTRTVNDQGALPGMVWQDRDVYLQGPIWAKIPHTDGHFHPSPLMGGFGLKHPPPQIMIKNTPVPANPPTTFSPAKFASFITQYSTGQVSVEIEWELQKENSKRWNPEIQYTSNYNKSVNVDFTVDTNGVYSEPRPIGTRYLTRPL

SEQ ID NO: 2186 - protein, 736 aa, Artificial Sequence
  Description of Artificial Sequence: Synthetic polypeptide
MAADGYLPDWLEDNLSEGIREWWALQPGAPKPKANQQHQDNARGLVLPGYKYLGPGNGLDKGEPVNAADAAALEHDKAYDQQLKAGDNPYLKYNHADAEFQERLKEDTSFGGNLGRAVFQAKKRLLEPLGLVEEAAKTAPGKKRPVDQSPQEPDSSSGVGKSGKQPARKRLNFGQTGDSESVPDPQPLGEPPAAPTSLGSNTMASGGGAPMADNNEGADGVGNSSGNWHCDSQWLGDRVITTSTRTWALPTYNNHLYKQISSQSGASNDNHYFGYSTPWGYFDFNRFHCHFSPRDWQRLINNNWGFRPKKLSFKLFNIQVKEVTQNDGTTTIANNLTSTVQVFTDSEYQLPYVLGSAHQGCLPPFPADVFMVPQYGYLTLNNGSQAVGRSSFYCLEYFPSQMLRTGNNFQFSYTFEDVPFHSSYAHSQSLDRLMNPLIDQYLYYLNRTQGTTSGTTNQSRLLFSQAGPQSMSLQARNWLPGPCYRQQRLSKVANDNNNSNFPWTAASKYHLNGRDSLVNPGPAMASHKDDEEKFFPMHGNLIFGKEGTTASNAELDNVMITDEEEIRTTNPVATEQYGTVANNLQSSNTAPTTRTVNDQGALPGMVWQDRDVYLQGPIWAKIPHTDGHFHPSPLMGGFGLKHPPPQIMIKNTPVPANPPTTFVPAKFASFITQYSTGQVSVEIEWELQKENSKRWNPEIQYTSNYNKSVNVDFTVDTNGVYSEPRPIGTRYLTRPL

SEQ ID NO: 2187 - protein, 736 aa, Artificial Sequence
  Description of Artificial Sequence: Synthetic polypeptide
  misc_feature (168)..(168): Xaa can be any naturally occurring amino acid
  misc_feature (204)..(204): Xaa can be any naturally occurring amino acid
  misc_feature (266)..(266): Xaa can be any naturally occurring amino acid
  misc_feature (311)..(311): Xaa can be any naturally occurring amino acid
  misc_feature (411)..(411): Xaa can be any naturally occurring amino acid
  misc_feature (460)..(460): Xaa can be any naturally occurring amino acid
  misc_feature (493)..(493): Xaa can be any naturally occurring amino acid
  misc_feature (562)..(562): Xaa can be any naturally occurring amino acid
  misc_feature (576)..(576): Xaa can be any naturally occurring amino acid
  misc_feature (587)..(587): Xaa can be any naturally occurring amino acid
  misc_feature (609)..(609): Xaa can be any naturally occurring amino acid
MAADGYLPDWLEDNLSEGIREWWDLKPGAPKPKANQQKQDDGRGLVLPGYKYLGPFNGLDKGEPVNAADAAALEHDKAYDQQLKAGDNPYLRYNHADAEFQERLQEDTSFGGNLGRAVFQAKKRVLEPLGLVEEGAKTAPGKKRPVEQSPQEPDSSSGIGKKGQQPAXKRLNFGQTGDSESVPDPQPLGEPPAAPSGVGSNTMXAGGGAPMADNNEGADGVGNASGNWHCDSTWLGDRVITTSTRTWALPTYNNHLYKQISSQSGXSTNDNTYFGYSTPWGYFDFNRFHCHFSPRDWQRLINNNWGFRPKXLNFKLFNIQVKEVTTNDGTTTIANNLTSTVQVFTDSEYQLPYVLGSAHQGCLPPFPADVFMIPQYGYLTLNNGSQAVGRSSFYCLEYFPSQMLRTGNNFXFSYTFEDVPFHSSYAHSQSLDRLMNPLIDQYLYYLSRTQTTSGTAGNRXLQFSQAGPSSMANQAKNWLPGPCYRQQRVSKTXNQNNNSNFAWTGATKYHLNGRDSLVNPGPAMATHKDDEDKFFPMSGVLIFGKQGAGNSNVDLDNVMITXEEEIKTTNPVATEXYGTVATNLQSXNTAPATGTVNSQGALPGMVWQXRDVYLQGPIWAKIPHTDGHFHPSPLMGGFGLKHPPPQILIKNTPVPANPPTTFSPAKFASFITQYSTGQVSVEIEWELQKENSKRWNPEIQYTSNYNKSTNVDFAVDTNGVYSEPRPIGTRYLTRNL

SEQ ID NO: 2188 - DNA, 2208 bp, Artificial Sequence
  Description of Artificial Sequence: Synthetic polynucleotide
  misc_feature (502)..(504): n is a, c, g, or t
  misc_feature (610)..(612): n is a, c, g, or t
  misc_feature (796)..(798): n is a, c, g, or t
  misc_feature (931)..(933): n is a, c, g, or t
  misc_feature (1231)..(1233): n is a, c, g, or t
  misc_feature (1378)..(1380): n is a, c, g, or t
  misc_feature (1477)..(1479): n is a, c, g, or t
  misc_feature (1684)..(1686): n is a, c, g, or t
  misc_feature (1726)..(1728): n is a, c, g, or t
  misc_feature (1759)..(1761): n is a, c, g, or t
  misc_feature (1825)..(1827): n is a, c, g, or t
atggctgccgatggttatcttccagattggctcgaggacaacctctctgagggcattcgcgagtggtgggacttgaaacctggagccccgaaacccaaagccaaccagcaaaagcaggacgacggccggggtctggtgcttcctggctacaagtacctcggacccttcaacggactcgacaagggggagcccgtcaacgcggcggacgcagcggccctcgagcacgacaaggcctacgaccagcagctcaaagcgggtgacaatccgtacctgcggtataaccacgccgacgccgagtttcaggagcgtctgcaagaagatacgtcttttgggggcaacctcgggcgagcagtcttccaggccaagaagcgggttctcgaacctctcggtctggttgaggaaggcgctaagacggctcctggaaagaagagaccggtagagcaatcaccccaggaaccagactcctcttcgggcatcggcaagaaaggccagcagcccgcgnnnaagagactcaactttgggcagacaggcgactcagagtcagtgcccgaccctcaaccactcggagaaccccccgcagccccctctggtgtgggatctaatacaatgnnngcaggcggtggcgctccaatggcagacaataacgaaggcgccgacggagtgggtaacgcctcaggaaattggcattgcgattccacatggctgggcgacagagtcatcaccaccagcacccgaacctgggccctccccacctacaacaaccacctctacaagcaaatctccagccaatcgggannnagcaccaacgacaacacctacttcggctacagcaccccctgggggtattttgactttaacagattccactgccacttctcaccacgtgactggcagcgactcatcaacaacaactggggattccggcccaagnnnctcaacttcaagctcttcaacatccaggtcaaggaggtcacgacgaatgatggcaccacgaccatcgccaataaccttaccagcacggttcaggtctttacggactcggaataccagctcccgtacgtcctcggctctgcgcaccagggctgcctgcctccgttcccggcggacgtcttcatgattcctcagtacgggtacctgactctgaacaatggcagtcaggccgtgggccgttcctccttctactgcctggagtactttccttctcaaatgctgagaacgggcaacaactttnnnttcagctacacgtttgaggacgtgccttttcacagcagctacgcgcacagccaaagcctggaccggctgatgaaccccctcatcgaccagtacctgtactacctgtctcggactcagaccacgagtggtaccgcaggaaatcggnnnttgcaattttctcaggccgggcctagtagcatggcgaatcaggccaaaaactggctacccgggccctgctaccggcagcaacgcgtctccaagacannnaatcaaaataacaacagcaactttgcctggaccggtgccaccaagtatcatctgaatggcagagactctctggtaaatcccggtcccgctatggcaacccacaaggacgacgaagacaaattttttccgatgagcggagtcttaatatttgggaaacagggagctggaaatagcaacgtggaccttgacaacgttatgataaccnnngaggaagaaattaaaaccaccaacccagtggccacagaannntacggcacggtggccactaacctgcaatcgnnnaacaccgctcctgctacagggaccgtcaacagtcaaggagccttacctggcatggtctggcagnnncgggacgtgtacctgcagggtcctatctgggccaagattcctcacacggacggacactttcatccctcgccgctgatgggaggctttggactgaaacacccgcctcctcagatcctgattaagaatacacctgttcccgcgaatcctccaactaccttcagtccagctaagtttgcgtcgttcatcacgcagtacagcaccggacaggtcagcgtggaaattgaatgggagctgcagaaagaaaacagcaaacgctggaacccagagattcaatacacttccaactacaacaaatctacaaatgtggactttgctgttgacacaaatggcgtttattctgagcctcgccccatcggcacccgttacctcacccgtaatctg

SEQ ID NO: 2189 - protein, 737 aa, Artificial Sequence
  Description of Artificial Sequence: Synthetic polypeptide
  misc_feature (157)..(157): Xaa can be any naturally occurring amino acid
  misc_feature (168)..(168): Xaa can be any naturally occurring amino acid
  misc_feature (262)..(263): Xaa can be any naturally occurring amino acid
  misc_feature (312)..(312): Xaa can be any naturally occurring amino acid
  misc_feature (412)..(412): Xaa can be any naturally occurring amino acid
  misc_feature (460)..(461): Xaa can be any naturally occurring amino acid
  misc_feature (552)..(552): Xaa can be any naturally occurring amino acid
  misc_feature (556)..(557): Xaa can be any naturally occurring amino acid
  misc_feature (563)..(563): Xaa can be any naturally occurring amino acid
  misc_feature (580)..(580): Xaa can be any naturally occurring amino acid
  misc_feature (588)..(588): Xaa can be any naturally occurring amino acid
  misc_feature (664)..(664): Xaa can be any naturally occurring amino acid
MAADGYLPDWLEDNLSEGIREWWDLKPGAPKPKANQQKQDDGRGLVLPGYKYLGPFNGLDKGEPVNAADAAALEHDKAYDQQLKAGDNPYLRYNHADAEFQERLQEDTSFGGNLGRAVFQAKKRVLEPLGLVEEGAKTAPGKKRPVEQSPQEPDSSXGIGKKGQQPAXKRLNFGQTGDSESVPDPQPLGEPPAAPSGVGSNTMAAGGGAPMADNNEGADGVGNASGNWHCDSTWLGDRVITTSTRTWALPTYNNHLYKQISXXQSGGSTNDNTYFGYSTPWGYFDFNRFHCHFSPRDWQRLINNNWGFRPKXLNFKLFNIQVKEVTTNDGTTTIANNLTSTVQVFTDSEYQLPYVLGSAHQGCLPPFPADVFMIPQYGYLTLNNGSQAVGRSSFYCLEYFPSQMLRTGNNFXFSYTFEDVPFHSSYAHSQSLDRLMNPLIDQYLYYLSRTQTTGGTAGNXXLQFSQAGPSSMANQAKNWLPGPCYRQQRVSKTTNQNNNSNFAWTGATKYHLNGRDSLVNPGVAMATHKDDEDRFFPSSGVLIFGKQGAGNXNVDXXNVMITXEEEIKTTNPVATEEYGXVATNLQSXNTAPQTGTVNSQGALPGMVWQNRDVYLQGPIWAKIPHTDGNFHPSPLMGGFGLKHPPPQILIKNTPVPANPPTTFXPAKFASFITQYSTGQVSVEIEWELQKENSKRWNPEIQYTSNYNKSTNVDFAVDTEGVYSEPRPIGTRYLTRNL

SEQ ID NO: 2190 - DNA, 2211 bp, Artificial Sequence
  Description of Artificial Sequence: Synthetic polynucleotide
  misc_feature (469)..(471): n is a, c, g, or t
  misc_feature (502)..(504): n is a, c, g, or t
  misc_feature (784)..(789): n is a, c, g, or t
  misc_feature (934)..(936): n is a, c, g, or t
  misc_feature (1234)..(1236): n is a, c, g, or t
  misc_feature (1378)..(1383): n is a, c, g, or t
  misc_feature (1654)..(1656): n is a, c, g, or t
  misc_feature (1666)..(1671): n is a, c, g, or t
  misc_feature (1687)..(1689): n is a, c, g, or t
  misc_feature (1738)..(1740): n is a, c, g, or t
  misc_feature (1762)..(1764): n is a, c, g, or t
  misc_feature (1990)..(1992): n is a, c, g, or t
atggctgccgatggttatcttccagattggctcgaggacaacctctctgagggcattcgcgagtggtgggacttgaaacctggagccccgaaacccaaagccaaccagcaaaagcaggacgacggccggggtctggtgcttcctggctacaagtacctcggacccttcaacggactcgacaagggggagcccgtcaacgcggcggacgcagcggccctcgagcacgacaaggcctacgaccagcagctcaaagcgggtgacaatccgtacctgcggtataaccacgccgacgccgagtttcaggagcgtctgcaagaagatacgtcttttgggggcaacctcgggcgagcagtcttccaggccaagaagcgggttctcgaacctctcggtctggttgaggaaggcgctaagacggctcctggaaagaagagaccggtagagcaatcaccccaggaaccagactcctctnnnggcatcggcaagaaaggccagcagcccgcgnnnaagagactcaactttgggcagactggcgactcagagtcagtgcccgaccctcaaccactcggagaaccccccgcagccccctctggtgtgggatctaatacaatggctgcaggcggtggcgctccaatggcagacaataacgaaggcgccgacggagtgggtaatgcctcaggaaattggcattgcgattccacatggctgggcgacagagtcatcaccaccagcacccgaacctgggccctccccacctacaacaaccacctctacaagcaaatctccnnnnnncaatcgggaggaagcaccaacgacaacacctacttcggctacagcaccccctgggggtattttgactttaacagattccactgccacttctcaccacgtgactggcagcgactcatcaacaacaactggggattccggcccaagnnnctcaacttcaagctcttcaacatccaggtcaaggaggtcacgacgaatgatggcaccacgaccatcgccaataaccttaccagcacggttcaggtctttacggactcggaataccagctcccgtacgtcctcggctctgcgcaccagggctgcctgcctccgttcccggcggacgtcttcatgattcctcagtacgggtacctgactctgaacaatggcagtcaggccgtgggccgttcctccttctactgcctggagtactttccttctcaaatgctgagaacgggcaacaactttnnnttcagctacacgtttgaggacgtgccttttcacagcagctacgcgcacagccaaagcctggaccggctgatgaaccccctcatcgaccagtacctgtactacctgtctcggactcagaccacgggaggtaccgcaggaaatnnnnnnttgcaattttctcaggccgggcctagtagcatggcgaatcaggccaaaaactggctacccgggccctgctaccggcagcaacgcgtctccaagacaacgaatcaaaataacaacagcaactttgcctggaccggtgccaccaagtatcatctgaatggcagagactctctggtaaatcccggtgtcgctatggcaacccacaaggacgacgaagaccgattttttccgtccagcggagtcttaatatttgggaaacagggagctggaaatnnnaacgtggacnnnnnnaacgttatgataaccnnngaggaagaaattaaaaccaccaacccagtggccacagaagagtacggcnnngtggccactaacctgcaatcgnnnaacaccgctcctcaaacagggaccgtcaacagtcaaggagccttacctggcatggtctggcagaaccgggacgtgtacctgcagggtcctatctgggccaagattcctcacacggacggaaactttcatccctcgccgctgatgggaggctttggactgaaacacccgcctcctcagatcctgattaagaatacacctgttcccgcgaatcctccaactaccttcnnnccagctaagtttgcgtcgttcatcacgcagtacagcaccggacaggtcagcgtggaaattgaatgggagctgcagaaagaaaacagcaaacgctggaacccagagattcaatacacttccaactacaacaaatctacaaatgtggactttgctgttgacacagaaggcgtttattctgagcctcgccccatcggcacccgttacctcacccgtaatctg

SEQ ID NO: 2191 - protein, 738 aa, Artificial Sequence
  Description of Artificial Sequence: Synthetic polypeptide
  misc_feature (158)..(158): Xaa can be any naturally occurring amino acid
  misc_feature (169)..(169): Xaa can be any naturally occurring amino acid
  misc_feature (564)..(564): Xaa can be any naturally occurring amino acid
MAADGYLPDWLEDNLSEGIREWWDLKPGAPKPKANQQKQDDGRGLVLPGYKYLGPFNGLDKGEPVNAADAAALEHDKAYDQQLKAGDNPYLRYNHADAEFQERLQEDTSFGGNLGRAVFQAKKRVLEPLGLVEEGAKTAPGKKRPVEQSPQREPDSSXGIGKKGQQPAXKRLNFGQTGDSESVPDPQPLGEPPAAPSGVGSNTMAAGGGAPMADNNEGADGVGNSSGNWHCDSTWLGDRVITTSTRTWALPTYNNHLYKQISNGTSGGSTNDNTYFGYSTPWGYFDFNRFHCHFSPRDWQRLINNNWGFRPKRLNFKLFNIQVKEVTTNEGTKTIANNLTSTVQVFTDSEYQLPYVLGSAHQGCLPPFPADVFMIPQYGYLTLNNGSQAVGRSSFYCLEYFPSQMLRTGNNFQFSYTFEDVPFHSSYAHSQSLDRLMNPLIDQYLYYLSRTQTTGGTAGTQTLQFSQAGPSSMANQAKNWLPGPCYRQQRVSTTTNQNNNSNFAWTGATKYHLNGRDSLVNPGVAMATHKDDEDRFFPSSGVLIFGKQGAGNDNVDYSNVMITXEEEIKTTNPVATEEYGVVATNLQSANTAPQTGTVNSQGALPGMVWQNRDVYLQGPIWAKIPHTDGNFHPSPLMGGFGLKHPPPQILIKNTPVPADPPTTFNQAKLNSFITQYSTGQVSVEIEWELQKENSKRWNPEIQYTSNYYKSTNVDFAVNTEGVYSEPRPIGTRYLTRNL

SEQ ID NO: 2192 - DNA, 2214 bp, Artificial Sequence
  Description of Artificial Sequence: Synthetic polynucleotide
  misc_feature (472)..(474): n is a, c, g, or t
  misc_feature (505)..(507): n is a, c, g, or t
  misc_feature (1690)..(1692): n is a, c, g, or t
atggctgccgatggttatcttccagattggctcgaggacaacctctctgagggcattcgcgagtggtgggacctgaaacctggagccccgaaacccaaagccaaccagcaaaagcaggacgacggccggggtctggtgcttcctggctacaagtacctcggacccttcaacggactcgacaagggggagcccgtcaacgcggcggacgcagcggccctcgagcacgacaaggcctacgaccagcagctcaaagcgggtgacaatccgtacctgcggtataatcacgccgacgccgagtttcaggagcgtctgcaagaagatacgtcttttgggggcaacctcgggcgagcagtcttccaggccaagaagcgggttctcgaacctctcggtctggttgaggaaggcgctaagacggctcctggaaagaagagaccggtagagcagtcaccacagcgtgagcccgactcctccnnnggcatcggcaagaaaggccagcagcccgccnnnaagagactcaatttcggtcagactggcgactcagagtcagtccccgaccctcaacctctcggagaacctccagcagcgccctctggtgtgggatctaatacaatggctgcaggcggtggcgcaccaatggcagacaataacgaaggtgccgacggagtgggtaattcctcgggaaattggcattgcgattccacatggctgggcgacagagtcatcaccaccagcacccgaacctgggccctgcccacctacaacaaccacctctacaagcaaatctccaacgggacctcgggaggcagcaccaacgacaacacctactttggctacagcaccccctgggggtattttgactttaacagattccactgccacttctcaccacgtgactggcagcgactcatcaacaacaactggggattccggcccaagagactcaacttcaagctcttcaacatccaggtcaaagaggtcacgacgaatgaaggcaccaagaccatcgccaataacctcaccagcaccgtccaggtgtttacggactcggaataccagctgccgtacgtcctcggctctgcccaccagggctgcctgcctccgttcccggcggacgtcttcatgattcctcagtacggctacctgactctcaacaacggtagtcaggccgtgggacgttcctccttctactgcctggagtacttcccctctcagatgctgagaacgggcaacaactttcaattcagctacactttcgaggacgtgcctttccacagcagctacgcgcacagccagagtttggacaggctgatgaatcctctcatcgaccagtacctgtactacctgtcaagaacccagactacgggaggcacagcgggaacccagacgttgcagttttctcaggccgggcctagcagcatggcgaatcaggccaaaaactggctgcctggaccctgctacagacagcagcgcgtctccacgacaacgaatcaaaacaacaacagcaactttgcctggactggtgccaccaagtatcatctgaacggcagagactctctggtgaatccgggcgtcgccatggcaacccacaaggacgacgaggaccgcttcttcccatccagcggcgtcctcatatttggcaagcagggagctggaaatgacaacgtggactatagcaacgtgatgataaccnnngaggaagaaatcaagaccaccaaccccgtggccacagaagagtatggcgtggtggctactaacctacagtcggcaaacaccgctcctcaaacggggaccgtcaacagccagggagccttacctggcatggtctggcagaaccgggacgtgtacctgcagggtcctatttgggccaagattcctcacacagatggcaactttcacccgtctcctttaatgggcggctttggacttaaacatccgcctcctcagatcctcatcaaaaacactcctgttcctgcggatcctccaacaacgttcaaccaggccaagctgaattctttcatcacgcagtacagcaccggacaagtcagcgtggagatcgagtgggagctgcagaaggagaacagcaagcgctggaacccagagattcagtatacttccaactactacaaatctacaaatgtggactttgctgttaatactgagggtgtttactctgagcctcgccccattggcactcgttacctcacccgtaatctg

SEQ ID NO: 2193 - protein, 738 aa, Artificial Sequence
  Description of Artificial Sequence: Synthetic polypeptide
  misc_feature (158)..(158): Xaa can be any naturally occurring amino acid
  misc_feature (169)..(169): Xaa can be any naturally occurring amino acid
  misc_feature (315)..(315): Xaa can be any naturally occurring amino acid
  misc_feature (413)..(413): Xaa can be any naturally occurring amino acid
  misc_feature (472)..(472): Xaa can be any naturally occurring amino acid
  misc_feature (534)..(534): Xaa can be any naturally occurring amino acid
  misc_feature (542)..(542): Xaa can be any naturally occurring amino acid
  misc_feature (595)..(595): Xaa can be any naturally occurring amino acid
MAADGYLPDWLEDNLSEGIREWWDLKPGAPKPKANQQKQDDGRGLVLPGYKYLGPFNGLDKGEPVNAADAAALEHDKAYDQQLKAGDNPYLRYNHADAEFQERLQEDTSFGGNLGRAVFQAKKRVLEPLGLVEEGAKTAPGKKRPVEQSPQREPDSSXGIGKKGQQPAXKRLNFGQTGDSESVPDPQPLGEPPAAPSGVGSNTMAAGGGAPMADNNEGADGVGSSSGNWHCDSTWLGDRVITTSTRTWALPTYNNHLYKQISNGTSGGSTNDNTYFGYSTPWGYFDFNRFHCHFSPRDWQRLINNNWGFRPKRLXFKLFNIQVKEVTQNEGTKTIANNLTSTIQVFTDSEYQLPYVLGSAHQGCLPPFPADVFMIPQYGYLTLNNGSQAVGRSSFYCLEYFPSQMLRTGNNFXFSYTFEDVPFHSSYAHSQSLDRLMNPLIDQYLYYLSRTQTTGGTAGTQTLQFSQAGPSXMANQAKNWLPGPCYRQQRVSTTTSQNNNSNFAWTGATKYHLNGRDSLVNPGVAMATHKDDEXRFFPSSGXLIFGKQGAGKDNVDYSNVMLTSEEEIKTTNPVATEEYGVVADNLQQQNTAPQXGTVNSQGALPGMVWQNRDVYLQGPIWAKIPHTDGNFHPSPLMGGFGLKHPPPQILIKNTPVPADPPTTFNQAKLNSFITQYSTGQVSVEIEWELQKENSKRWNPEIQYTSNYYKSTNVDFAVNTEGVYSEPRPIGTRYLTRNL

SEQ ID NO: 2194 - DNA, 2214 bp, Artificial Sequence
  Description of Artificial Sequence: Synthetic polynucleotide
  misc_feature (472)..(474): n is a, c, g, or t
  misc_feature (505)..(507): n is a, c, g, or t
  misc_feature (943)..(945): n is a, c, g, or t
  misc_feature (1237)..(1239): n is a, c, g, or t
  misc_feature (1414)..(1416): n is a, c, g, or t
  misc_feature (1600)..(1602): n is a, c, g, or t
  misc_feature (1624)..(1626): n is a, c, g, or t
  misc_feature (1783)..(1785): n is a, c, g, or t
atggctgccgatggttatcttccagattggctcgaggacaacctctctgagggcattcgcgagtggtgggacctgaaacctggagccccgaaacccaaagccaaccagcaaaagcaggacgacggccggggtctggtgcttcctggctacaagtacctcggacccttcaacggactcgacaagggggagcccgtcaacgcggcggacgcagcggccctcgagcacgacaaggcctacgaccagcagctcaaagcgggtgacaatccgtacctgcggtataatcacgccgacgccgagtttcaggagcgtctgcaagaagatacgtcttttgggggcaacctcgggcgagcagtcttccaggccaagaagcgggttctcgaacctctcggtctggttgaggaaggcgctaagacggctcctggaaagaagagaccggtagagcagtcaccacagcgtgagcccgactcctccnnnggcatcggcaagaaaggccagcagcccgccnnnaagagactcaatttcggtcagactggcgactcagagtcagtccccgaccctcaacctctcggagaacctccagcagcgccctctggtgtgggatctaatacaatggctgcaggcggtggcgcaccaatggcagacaataacgaaggtgccgacggagtgggtagttcctcgggaaattggcattgcgattccacatggctgggcgacagagtcatcaccaccagcacccgaacctgggccctgcccacctacaacaaccacctctacaagcaaatctccaacgggacctcgggaggcagcaccaacgacaacacctactttggctacagcaccccctgggggtattttgactttaacagattccactgccacttctcaccacgtgactggcagcgactcatcaacaacaactggggattccggcccaagagactcnnnttcaagctcttcaacatccaggtcaaagaggtcacgcagaatgaaggcaccaagaccatcgccaataacctcaccagcaccatccaggtgtttacggactcggaataccagctgccgtacgtcctcggctctgcccaccagggctgcctgcctccgttcccggcggacgtcttcatgattcctcagtacggctacctgactctcaacaacggtagtcaggccgtgggacgttcctccttctactgcctggagtacttcccctctcagatgctgagaacgggcaacaactttnnnttcagctacactttcgaggacgtgcctttccacagcagctacgcgcacagccagagtttggacaggctgatgaatcctctcatcgaccagtacctgtactacctgtcaagaacccagactacgggaggcacagcgggaacccagacgttgcagttttctcaggccgggcctagcnnnatggcgaatcaggccaaaaactggctgcctggaccctgctacagacagcagcgcgtctccacgacaacgtcgcaaaacaacaacagcaactttgcctggactggtgccaccaagtatcatctgaacggcagagactctctggtgaatccgggcgtcgccatggcaacccacaaggacgacgagnnncgcttcttcccatccagcggcnnnctcatatttggcaagcagggagctggaaaagacaacgtggactatagcaacgtgatgctaaccagcgaggaagaaatcaagaccaccaaccccgtggccacagaagagtatggcgtggtggctgataacctacagcagcaaaacaccgctcctcaannngggaccgtcaacagccagggagccttacctggcatggtctggcagaaccgggacgtgtacctgcagggtcctatttgggccaagattcctcacacagatggcaactttcacccgtctcctttaatgggcggctttggacttaaacatccgcctcctcagatcctcatcaaaaacactcctgttcctgcggatcctccaacaacgttcaaccaggccaagctgaattctttcatcacgcagtacagcaccggacaagtcagcgtggagatcgagtgggagctgcagaaggagaacagcaagcgctggaacccagagattcagtatacttccaactactacaaatctacaaatgtggactttgctgttaatactgagggtgtttactctgagcctcgccccattggcactcgttacctcacccgtaatctg

SEQ ID NO: 2195 - protein, 738 aa, Artificial Sequence
  Description of Artificial Sequence: Synthetic polypeptide
  misc_feature (169)..(169): Xaa can be any naturally occurring amino acid
  misc_feature (315)..(315): Xaa can be any naturally occurring amino acid
  misc_feature (534)..(534): Xaa can be any naturally occurring amino acid
  misc_feature (542)..(542): Xaa can be any naturally occurring amino acid
MAADGYLPDWLEDNLSEGIREWWDLKPGAPKPKANQQKQDDGRGLVLPGYKYLGPFNGLDKGEPVNAADAAALEHDKAYDQQLKAGDNPYLRYNHADAEFQERLQEDTSFGGNLGRAVFQAKKRVLEPLGLVEEGAKTAPGKKRPVEPSPQRSPDSSTGIGKKGQQPAXKRLNFGQTGDSESVPDPQPIGEPPAAPSGVGSGTMAAGGGAPMADNNEGADGVGSSSGNWHCDSTWLGDRVITTSTRTWALPTYNNHLYKQISNGTSGGSTNDNTYFGYSTPWGYFDFNRFHCHFSPRDWQRLINNNWGFRPKRLXFKLFNIQVKEVTQNEGTKTIANNLTSTIQVFTDSEYQLPYVLGSAHQGCLPPFPADVFMIPQYGYLTLNNGSQAVGRSSFYCLEYFPSQMLRTGNNFEFSYTFEDVPFHSSYAHSQSLDRLMNPLIDQYLYYLSRTQSTGGTAGTQQLLFSQAGPSNMSAQAKNWLPGPCYRQQRVSTTLSQNNNSNFAWTGATKYHLNGRDSLVNPGVAMATHKDDEXRFFPSSGXLMFGKQGAGKDNVDYSNVMLTSEEEIKTTNPVATEQYGVVADNLQQQNTAPIVGAVNSQGALPGMVWQNRDVYLQGPIWAKIPHTDGNFHPSPLMGGFGLKHPPPQILIKNTPVPADPPTTFNQAKLNSFITQYSTGQVSVEIEWELQKENSKRWNPEIQYTSNYYKSTNVDFAVNTEGVYSEPRPIGTRYLTRNL

SEQ ID NO: 2196 - DNA, 2214 bp, Artificial Sequence
  Description of Artificial Sequence: Synthetic polynucleotide
  misc_feature (505)..(507): n is a, c, g, or t
  misc_feature (943)..(945): n is a, c, g, or t
  misc_feature (1600)..(1602): n is a, c, g, or t
  misc_feature (1624)..(1626): n is a, c, g, or t
atggctgccgatggttatcttccagattggctcgaggacaacctctctgagggcattcgcgagtggtgggacctgaaacctggagccccgaaacccaaagccaaccagcaaaagcaggacgacggccggggtctggtgcttcctggctacaagtacctcggacccttcaacggactcgacaagggggagcccgtcaacgcggcggacgcagcggccctcgagcacgacaaggcctacgaccagcagctcaaagcgggtgacaatccgtacctgcggtataatcacgccgacgccgagtttcaggagcgtctgcaagaagatacgtcttttgggggcaacctcgggcgagcagtcttccaggccaagaagcgggttctcgaacctctcggtctggttgaggaaggcgctaagacggctcctggaaagaagagaccggtagagccgtcaccacagcgttcccccgactcctccacgggcatcggcaagaaaggccagcagcccgccnnnaagagactcaatttcggtcagactggcgactcagagtcagtccccgaccctcaacctatcggagaacctccagcagcgccctctggtgtgggatctggtacaatggctgcaggcggtggcgcaccaatggcagacaataacgaaggtgccgacggagtgggtagttcctcgggaaattggcattgcgattccacatggctgggcgacagagtcatcaccaccagcacccgaacctgggccctgcccacctacaacaaccacctctacaagcaaatctccaacgggacctcgggaggcagcaccaacgacaacacctactttggctacagcaccccctgggggtattttgactttaacagattccactgccacttctcaccacgtgactggcagcgactcatcaacaacaactggggattccggcccaagagactcnnnttcaagctcttcaacatccaggtcaaagaggtcacgcagaatgaaggcaccaagaccatcgccaataacctcaccagcaccatccaggtgtttacggactcggaataccagctgccgtacgtcctcggctctgcccaccagggctgcctgcctccgttcccggcggacgtcttcatgattcctcagtacggctacctgactctcaacaacggtagtcaggccgtgggacgttcctccttctactgcctggagtacttcccctctcagatgctgagaacgggcaacaactttgagttcagctacactttcgaggacgtgcctttccacagcagctacgcgcacagccagagtttggacaggctgatgaatcctctcatcgaccagtacctgtactacctgtcaagaacccagtctacgggaggcacagcgggaacccagcagttgctgttttctcaggccgggcctagcaacatgtcggctcaggccaaaaactggctgcctggaccctgctacagacagcagcgcgtctccacgacactgtcgcaaaacaacaacagcaactttgcctggactggtgccaccaagtatcatctgaacggcagagactctctggtgaatccgggcgtcgccatggcaacccacaaggacgacgagnnncgcttcttcccatccagcggcnnnctcatgtttggcaagcagggagctggaaaagacaacgtggactatagcaacgtgatgctaaccagcgaggaagaaatcaagaccaccaaccccgtggccacagaacagtatggcgtggtggctgataacctacagcagcaaaacaccgctcctattgtgggggccgtcaacagccagggagccttacctggcatggtctggcagaaccgggacgtgtacctgcagggtcctatttgggccaagattcctcacacagatggcaactttcacccgtctcctttaatgggcggctttggacttaaacatccgcctcctcagatcctcatcaaaaacactcctgttcctgcggatcctccaacaacgttcaaccaggccaagctgaattctttcatcacgcagtacagcaccggacaagtcagcgtggagatcgagtgggagctgcagaaggagaacagcaagcgctggaacccagagattcagtatacttccaactactacaaatctacaaatgtggactttgctgttaatactgagggtgtttactctgagcctcgccccattggcactcgttacctcacccgtaatctg

SEQ ID NO: 2197 - protein, 738 aa, Artificial Sequence
  Description of Artificial Sequence: Synthetic polypeptide
  misc_feature (471)..(471): Xaa can be any naturally occurring amino acid
MAADGYLPDWLEDNLSEGIREWWDLKPGAPKPKANQQKQDDGRGLVLPGYKYLGPFNGLDKGEPVNAADAAALEHDKAYDQQLKAGDNPYLRYNHADAEFQERLQEDTSFGGNLGRAVFQAKKRVLEPLGLVEEGAKTAPGKKRPVEPSPQRSPDSSTGIGKKGQQPAKKRLNFGQTGDSESVPDPQPIGEPPAGPSGLGSGTMAAGGGAPMADNNEGADGVGSSSGNWHCDSTWLGDRVITTSTRTWALPTYNNHLYKQISNGTSGGSTNDNTYFGYSTPWGYFDFNRFHCHFSPRDWQRLINNNWGFRPKRLNFKLFNIQVKEVTQNEGTKTIANNLTSTIQVFTDSEYQLPYVLGSAHQGCLPPFPADVFMIPQYGYLTLNNGSQAVGRSSFYCLEYFPSQMLRTGNNFEFSYTFEDVPFHSSYAHSQSLDRLMNPLIDQYLYYLSRTQSTGGTAGTQQLLFSQAGPXNMSAQAKNWLPGPCYRQQRVSTTLSQNNNSNFAWTGATKYHLNGRDSLVNPGVAMATHKDDEERFFPSSGVLMFGKQGAGKDNVDYSSVMLTSEEEIKTTNPVATEQYGVVADNLQQQNTAPIVGAVNSQGALPGMVWQNRDVYLQGPIWAKIPHTDGNFHPSPLMGGFGLKHPPPQILIKNTPVPADPPTTFSQAKLASFITQYSTGQVSVEIEWELQKENSKRWNPEIQYTSNYYKSTNVDFAVNTEGTYSEPRPIGTRYLTRNL

SEQ ID NO: 2198 - DNA, 2214 bp, Artificial Sequence
  Description of Artificial Sequence: Synthetic polynucleotide
  misc_feature (1411)..(1413): n is a, c, g, or t
atggctgccgatggttatcttccagattggctcgaggacaacctctctgagggcattcgcgagtggtgggacttgaaacctggagccccgaaacccaaagccaaccagcaaaagcaggacgacggccggggtctggtgcttcctggctacaagtacctcggacccttcaacggactcgacaagggggagcccgtcaacgcggcggacgcagcggccctcgagcacgacaaggcctacgaccagcagctcaaagcgggtgacaatccgtacctgcggtataaccacgccgacgccgagtttcaggagcgtctgcaagaagatacgtcttttgggggcaacctcgggcgagcagtcttccaggccaagaagcgggttctcgaacctctcggtctggttgaggaaggcgctaagacggctcctggaaagaagagaccggtagagccatcaccccagcgttctccagactcctctacgggcatcggcaagaaaggccagcagcccgcgaaaaagagactcaactttgggcagactggcgactcagagtcagtgcccgaccctcaaccaatcggagaaccccccgcaggcccctctggtctgggatctggtacaatggctgcaggcggtggcgctccaatggcagacaataacgaaggcgccgacggagtgggtagttcctcaggaaattggcattgcgattccacatggctgggcgacagagtcatcaccaccagcacccgaacctgggccctccccacctacaacaaccacctctacaagcaaatctccaacgggacttcgggaggaagcaccaacgacaacacctacttcggctacagcaccccctgggggtattttgactttaacagattccactgccacttctcaccacgtgactggcagcgactcatcaacaacaactggggattccggcccaagagactcaacttcaagctcttcaacatccaggtcaaggaggtcacgcagaatgaaggcaccaagaccatcgccaataaccttaccagcacgattcaggtctttacggactcggaataccagctcccgtacgtcctcggctctgcgcaccagggctgcctgcctccgttcccggcggacgtcttcatgattcctcagtacgggtacctgactctgaacaatggcagtcaggccgtgggccgttcctccttctactgcctggagtactttccttctcaaatgctgagaacgggcaacaactttgagttcagctacacgtttgaggacgtgccttttcacagcagctacgcgcacagccaaagcctggaccggctgatgaaccccctcatcgaccagtacctgtactacctgtctcggactcagtccacgggaggtaccgcaggaactcagcagttgctattttctcaggccgggcctnnnaacatgtcggctcaggccaaaaactggctacccgggccctgctaccggcagcaacgcgtctccacgacactgtcgcaaaataacaacagcaactttgcctggaccggtgccaccaagtatcatctgaatggcagagactctctggtaaatcccggtgtcgctatggcaacccacaaggacgacgaagagcgattttttccgtccagcggagtcttaatgtttgggaaacagggagctggaaaagacaacgtggactatagcagcgttatgctaaccagtgaggaagaaattaaaaccaccaacccagtggccacagaacagtacggcgtggtggccgataacctgcaacagcaaaacaccgctcctattgtaggggccgtcaacagtcaaggagccttacctggcatggtctggcagaaccgggacgtgtacctgcagggtcctatctgggccaagattcctcacacggacggaaactttcatccctcgccgctgatgggaggctttggactgaaacacccgcctcctcagatcctgattaagaatacacctgttcccgcggatcctccaactaccttcagtcaagctaagctggcgtcgttcatcacgcagtacagcaccggacaggtcagcgtggaaattgaatgggagctgcagaaagaaaacagcaaacgctggaacccagagattcaatacacttccaactactacaaatctacaaatgtggactttgctgttaacacagaaggcacttattctgagcctcgccccatcggcacccgttacctcacccgtaatctg

SEQ ID NO: 2199 - protein, 737 aa, Artificial Sequence
  Description of Artificial Sequence: Synthetic polypeptide
  misc_feature (148)..(148): Xaa can be any naturally occurring amino acid
  misc_feature (169)..(169): Xaa can be any naturally occurring amino acid
  misc_feature (314)..(314): Xaa can be any naturally occurring amino acid
  misc_feature (466)..(466): Xaa can be any naturally occurring amino acid
  misc_feature (563)..(563): Xaa can be any naturally occurring amino acid
  misc_feature (580)..(580): Xaa can be any naturally occurring amino acid
  misc_feature (588)..(588): Xaa can be any naturally occurring amino acid
MAADGYLPDWLEDNLSEGIREWWDLKPGAPKPKANQQKQDDGRGLVLPGYKYLGPFNGLDKGEPVNAADAAALEHDKAYDQQLKAGDNPYLRYNHADAEFQERLQEDTSFGGNLGRAVFQAKKRVLEPLGLVEEGAKTAPGKKRPVEXSPQRSPDSSTGIGKKGQQPAXKRLNFGQTGDSESVPDPQPLGEPPAAPSGVGSGTMAAGGGAPMADNNEGADGVGNASGNWHCDSTWLGDRVITTSTRTWALPTYNNHLYKQISSQSAGSTNDNTYFGYSTPWGYFDFNRFHCHFSPRDWQRLINNNWGFRPKKLXFKLFNIQVKEVTTNDGVTTIANNLTSTVQVFSDSEYQLPYVLGSAHQGCLPPFPADVFMIPQYGYLTLNNGSQSVGRSSFYCLEYFPSQMLRTGNNFEFSYTFEDVPFHSSYAHSQSLDRLMNPLIDQYLYYLARTQSTTGGTAGNRELQFXQAGPSTMAEQAKNWLPGPCYRQQRVSKTLDQNNNSNFAWTGATKYHLNGRNSLVNPGVAMATHKDDEDRFFPSSGVLIFGKTGAANKTTLENVLMTXEEEIKTTNPVATEEYGXVSSNLQSXNTAPQTQTVNSQGALPGMVWQNRDVYLQGPIWAKIPHTDGNFHPSPLMGGFGLKHPPPQILIKNTPVPANPPEVFTPAKFASFITQYSTGQVSVEIEWELQKENSKRWNPEIQYTSNYDKSTNVDFAVDSEGVYSEPRPIGTRYLTRNL

SEQ ID NO: 2200 - DNA, 2211 bp, Artificial Sequence
  Description of Artificial Sequence: Synthetic polynucleotide
  misc_feature (442)..(444): n is a, c, g, or t
  misc_feature (505)..(507): n is a, c, g, or t
  misc_feature (940)..(942): n is a, c, g, or t
  misc_feature (1396)..(1398): n is a, c, g, or t
  misc_feature (1687)..(1689): n is a, c, g, or t
  misc_feature (1738)..(1740): n is a, c, g, or t
  misc_feature (1762)..(1764): n is a, c, g, or t
atggctgccgatggttatcttccagattggctcgaggacaacctctctgagggcattcgcgagtggtgggacctgaaacctggagccccgaaacccaaagccaaccagcaaaagcaggacgacggccggggtctggtgcttcctggctacaagtacctcggacccttcaacggactcgacaagggggagcccgtcaacgcggcggacgcagcggccctcgagcacgacaaggcctacgaccagcagctcaaagcgggtgacaatccgtacctgcggtataaccacgccgacgccgagtttcaggagcgtctgcaagaagatacgtcatttgggggcaacctcgggcgagcagtcttccaggccaagaagcgggttctcgaacctctcggtctggttgaggaaggcgctaagacggctcctggaaagaagagaccggtagagnnntcacctcagcgttcccccgactcctccacgggcatcggcaagaaaggccagcagcccgccnnnaagagactcaatttcggtcagactggcgactcagagtcagtccccgaccctcaacctctcggagaacctccagcagcgccctctggtgtgggatctggtacaatggctgcaggcggtggcgcaccaatggcagacaataacgaaggtgccgacggagtgggtaatgcctcaggaaattggcattgcgattccacatggctgggcgacagagtcattaccaccagcacccgaacctgggccctgcccacctacaacaaccacctctacaagcaaatctccagtcaaagtgcaggtagtaccaacgacaacacctacttcggctacagcaccccctgggggtattttgactttaacagattccactgccacttctcaccacgtgactggcagcgactcatcaacaacaactggggattccggcccaagaagctgnnnttcaagctcttcaacatccaggtcaaggaggtcacgacgaatgacggcgttacgaccatcgctaataaccttaccagcacggttcaggtattctcggactcggaataccagctgccgtacgtcctcggctctgcgcaccagggctgcctgcctccgttcccggcggacgtcttcatgattcctcagtacggctacctgactctcaacaatggcagtcagtctgtgggacgttcctccttctactgcctggagtacttcccctctcagatgctgagaacgggcaacaactttgagttcagctacaccttcgaggacgtgcctttccacagcagctacgcacacagccagagcctggaccggctgatgaatcccctcatcgaccagtacttgtactacctggccagaacacagagtaccacaggaggcacagctggcaatcgggaactgcagtttnnncaggccgggccttcaactatggccgaacaagccaagaattggttacctggaccttgctaccggcaacaaagagtctccaaaacgctggatcaaaacaacaacagcaactttgcttggactggtgccaccaaatatcacctgaacggcagaaactcgttggttaatcccggcgtcgccatggcaactcacaaggacgacgaggaccgctttttcccatccagcggagtcctgatttttggaaaaactggagcagctaacaaaactacattggaaaatgtgttaatgacannngaagaagaaattaaaactactaatcctgtagccacggaagaatacgggnnngtcagcagcaacttacaatcgnnnaatactgcaccccagacacaaactgtcaacagccagggagccttacctggcatggtctggcagaaccgggacgtgtacctgcagggtcccatctgggccaagattcctcacacggatggcaactttcacccgtctcctttgatgggcggctttggacttaaacatccgcctcctcagatcctgatcaagaacactcccgttcccgctaatcctccggaggtgtttactcctgccaagtttgcttcgttcatcacacagtacagcaccggacaagtcagcgtggaaatcgagtgggagctgcagaaggaaaacagcaagcgctggaacccggagattcagtacacctccaactatgataagtcgactaatgtggactttgccgttgacagcgagggtgtttactctgagcctcgccctattggcactcgttacctcacccgtaatctg

SEQ ID NO: 2201 - protein, 735 aa, Artificial Sequence
  Description of Artificial Sequence: Synthetic polypeptide
  misc_feature (162)..(162): Xaa can be any naturally occurring amino acid
  misc_feature (168)..(168): Xaa can be any naturally occurring amino acid
  misc_feature (224)..(224): Xaa can be any naturally occurring amino acid
  misc_feature (310)..(310): Xaa can be any naturally occurring amino acid
  misc_feature (410)..(410): Xaa can be any naturally occurring amino acid
  misc_feature (446)..(446): Xaa can be any naturally occurring amino acid
  misc_feature (461)..(461): Xaa can be any naturally occurring amino acid
  misc_feature (471)..(471): Xaa can be any naturally occurring amino acid
  misc_feature (708)..(708): Xaa can be any naturally occurring amino acid
MAADGYLPDWLEDNLSEGIREWWDLKPGAPKPKANQQKQDDGRGLVLPGYKYLGPFNGLDKGEPVNAADAAALEHDKAYDQQLKAGDNPYLRYNHADAEFQERLQEDTSFGGNLGRAVFQAKKRVLEPLGLVEEGAKTAPGKKRPVEQSPQEPDSSSGIGKXGQQPAXKRLNFGQTGDSESVPDPQPLGEPPAAPSGVGSNTMASGGGAPMADNNEGADGVGNXSGNWHCDSTWLGDRVITTSTRTWALPTYNNHLYKQISSQSGASNDNHYFGYSTPWGYFDFNRFHCHFSPRDWQRLINNNWGFRPKXLNFKLFNIQVKEVTTNDGTTTIANNLTSTVQVFTDSEYQLPYVLGSAHQGCLPPFPADVFMIPQYGYLTLNNGSQAVGRSSFYCLEYFPSQMLRTGNNFXFSYTFEDVPFHSSYAHSQSLDRLMNPLIDQYLYYLXRTQTTSGTAQNRELXFSQAGPSSMXNQAKNWLPGPCYRQQRVSKTANDNNNSNFAWTGATKYHLNGRDSLVNPGPAMASHKDDEDKFFPMSGVLIFGKQGAGASNVDLDNVMITDEEEIKTTNPVATEQYGTVATNLQSSNTAPATGTVNSQGALPGMVWQDRDVYLQGPIWAKIPHTDGHFHPSPLMGGFGLKHPPPQILIKNTPVPANPPTTFSPAKFASFITQYSTGQVSVEIEWELQKENSKRWNPEIQYTSNYNKSXNVDFTVDTNGVYSEPRPIGTRYLTRNL

SEQ ID NO: 2202 - DNA, 2205 bp, Artificial Sequence
  Description of Artificial Sequence: Synthetic polynucleotide
  misc_feature (484)..(486): n is a, c, g, or t
  misc_feature (502)..(504): n is a, c, g, or t
  misc_feature (670)..(672): n is a, c, g, or t
  misc_feature (928)..(930): n is a, c, g, or t
  misc_feature (1228)..(1230): n is a, c, g, or t
  misc_feature (1336)..(1338): n is a, c, g, or t
  misc_feature (1381)..(1383): n is a, c, g, or t
  misc_feature (1411)..(1413): n is a, c, g, or t
  misc_feature (2122)..(2124): n is a, c, g, or t
atggctgccgatggttatcttccagattggctcgaggacaacctctctgagggcattcgcgagtggtgggacttgaaacctggagccccgaaacccaaagccaaccagcaaaagcaggacgacggccggggtctggtgcttcctggctacaagtacctcggacccttcaacggactcgacaagggggagcccgtcaacgcggcggatgcagcggccctcgagcacgacaaggcctacgaccagcagctcaaagcgggtgacaatccgtacctgcggtataaccacgccgacgccgagtttcaggagcgtctgcaagaagatacgtcttttgggggcaacctcgggcgagcagtcttccaggccaagaagagggttctcgaacctcttggtctggttgaggaaggtgctaagacggctcctggaaagaaacgtccggtagagcagtcgccacaagagccagactcctcctcgggcattggcaagnnnggccagcagcccgctnnnaagagactcaattttggtcagactggcgactcagagtcagtccccgacccacaacctctcggagaacctccagcagccccctctggtgtgggatctaatacaatggcttcaggcggtggcgcaccaatggcagacaataacgaaggcgccgacggagtgggtaatnnntcaggaaattggcattgcgattccacatggctgggcgacagagtcatcaccaccagcacccgaacatgggccttgcccacctataacaaccacctctacaagcaaatctccagtcaatcaggggccagcaacgacaaccactacttcggctacagcaccccctgggggtattttgatttcaacagattccactgccatttctcaccacgtgactggcagcgactcatcaacaacaattggggattccggcccaagnnnctcaacttcaagctcttcaacatccaagtcaaggaggtcacgacgaatgatggcaccacgaccatcgctaataaccttaccagcacggttcaagtcttcacggactcggagtaccagttgccgtacgtcctcggctctgcgcaccagggctgcctccctccgttcccggcggacgtgttcatgattccgcagtacggctacctaacgctcaacaatggcagccaggcagtgggacggtcatccttttactgcctggaatatttcccatcgcagatgctgagaacgggcaataactttnnnttcagctacaccttcgaggacgtgcctttccacagcagctacgcgcacagccagagcctggaccggctgatgaatcctctcatcgaccagtacctgtattacctgnnnagaactcagactacgtccggaactgcccaaaacagggagttgnnntttagccaggcgggtccatctagcatgnnnaatcaggccaaaaactggctacctggaccctgttaccggcagcagcgcgtttctaaaacagcaaatgacaacaacaacagcaactttgcctggactggtgctacaaaatatcaccttaatgggcgtgattctttagtcaaccctggccctgctatggcctcacacaaagacgacgaagacaagttctttcccatgagcggtgtcttgatttttggaaagcagggcgccggagcttcaaacgttgatttggacaatgtcatgatcacagacgaagaggaaatcaaaaccactaaccccgtggccaccgaacaatatgggactgtggcaaccaatctccagagcagcaacacagcccctgcgaccggaactgtgaattctcagggagccttacctggaatggtgtggcaagacagagacgtatacctgcagggtcctatttgggccaaaattcctcacacggatggacactttcacccgtctcctctcatgggcggctttggacttaagcacccgcctcctcagatcctcatcaaaaacacgcctgttcctgcgaatcctccgacaacgttttcgcctgcaaagtttgcttcattcatcacccagtattccacaggacaagtgagcgtggagattgaatgggagctgcagaaagaaaacagcaaacgctggaatcccgaaatacagtatacatctaactataataaatctnnnaacgttgatttcactgtggacaccaatggagtttatagtgagcctcgccccattggcacccgttacctcacccgtaacctg

SEQ ID NO: 2203 - protein, 735 aa, Artificial Sequence
  Description of Artificial Sequence: Synthetic polypeptide
  misc_feature (42)..(42): Xaa can be any naturally occurring amino acid
  misc_feature (168)..(168): Xaa can be any naturally occurring amino acid
  misc_feature (310)..(310): Xaa can be any naturally occurring amino acid
  misc_feature (410)..(410): Xaa can be any naturally occurring amino acid
  misc_feature (446)..(446): Xaa can be any naturally occurring amino acid
  misc_feature (461)..(461): Xaa can be any naturally occurring amino acid
  misc_feature (471)..(471): Xaa can be any naturally occurring amino acid
  misc_feature (475)..(475): Xaa can be any naturally occurring amino acid
  misc_feature (504)..(504): Xaa can be any naturally occurring amino acid
  misc_feature (539)..(539): Xaa can be any naturally occurring amino acid
MAADGYLPDWLEDNLSEGIREWWDLKPGAPQPKANQQHQDDXRGLVLPGYKYLGPFNGLDKGEPVNEADAAALEHDKAYDQQLKAGDNPYLKYNHADAEFQERLQEDTSFGGNLGRAVFQAKKRVLEPLGLVEEAAKTAPGKKRPVEQSPQEPDSSSGIGKSGQQPAXKRLNFGQTGDSESVPDPQPLGEPPAAPSGVGSNTMASGGGAPMADNNEGADGVGNSSGNWHCDSTWLGDRVITTSTRTWALPTYNNHLYKQISSQSGASNDNHYFGYSTPWGYFDFNRFHCHFSPRDWQRLINNNWGFRPKXLNFKLFNIQVKEVTQNDGTTTIANNLTSTVQVFTDSEYQLPYVLGSAHQGCLPPFPADVFMIPQYGYLTLNNGSQAVGRSSFYCLEYFPSQMLRTGNNFXFSYTFEDVPFHSSYAHSQSLDRLMNPLIDQYLYYLXRTQTTSGTTQQSRLXFSQAGPSSMXQQAXNWLPGPCYRQQRVSKTANDNNNSNFAWTXATKYHLNGRDSLVNPGPAMASHKDDEEKFFPMHGXLIFGKQGTGASNVDLDNVMITDEEEIRTTNPVATEQYGTVATNLQSSNTAPATGTVNSQGALPGMVWQDRDVYLQGPIWAKIPHTDGHFHPSPLMGGFGLKHPPPQILIKNTPVPANPPTTFSPAKFASFITQYSTGQVSVEIEWELQKENSKRWNPEIQYTSNYNKSVNVDFTVDTNGVYSEPRPIGTRYLTRNL

SEQ ID NO: 2204 - DNA, 2205 bp, Artificial Sequence
  Description of Artificial Sequence: Synthetic polynucleotide
  misc_feature (124)..(126): n is a, c, g, or t
  misc_feature (502)..(504): n is a, c, g, or t
  misc_feature (928)..(930): n is a, c, g, or t
  misc_feature (1228)..(1230): n is a, c, g, or t
  misc_feature (1336)..(1338): n is a, c, g, or t
  misc_feature (1381)..(1383): n is a, c, g, or t
  misc_feature (1411)..(1413): n is a, c, g, or t
  misc_feature (1423)..(1425): n is a, c, g, or t
  misc_feature (1510)..(1512): n is a, c, g, or t
  misc_feature (1615)..(1617): n is a, c, g, or t
atggctgctgacggttatcttccagattggctcgaggacaacctttctgaaggcattcgtgagtggtgggatctgaaacctggagcccctcaacccaaagcgaaccaacaacaccaggacgacnnncggggtcttgtgcttccgggttacaaatacctcggaccctttaacggactcgacaaaggagagccggtcaacgaggcggacgcggcagccctcgaacacgacaaagcttacgaccagcagctcaaggccggtgacaacccgtacctcaagtacaaccacgccgacgccgagtttcaggagcgtcttcaagaagatacgtcttttgggggcaaccttggcagagcagtcttccaggccaaaaagagggtccttgagcctcttggtctggttgaggaagcagctaaaacggctcctggaaagaagaggcctgtagaacagtctcctcaggaaccggactcatcatctggtattggcaaatcgggccaacagcctgccnnnaaaagactaaatttcggtcagactggagactcagagtcagtcccagaccctcaacctctcggagaaccaccagcagccccctcaggtgtgggatctaatacaatggcttcaggcggtggcgcaccaatggcagacaataacgagggtgccgatggagtgggtaattcctcaggaaattggcattgcgattccacatggctgggcgacagagtcatcaccaccagcaccagaacctgggccctgcccacttacaacaaccatctctacaagcaaatctccagccaatcaggagcttcaaacgacaaccactactttggctacagcaccccttgggggtattttgactttaacagattccactgccacttctcaccacgtgactggcagcgactcattaacaacaactggggattccggcccaagnnnctcaacttcaagctcttcaacatccaagttaaagaggtcacgcagaacgatggcacgacgactattgccaataaccttaccagcacggttcaagtgtttacggactcggagtatcagctcccgtacgtgctcgggtcggcgcaccaaggctgtctcccgccgtttccagcggacgtcttcatgatccctcagtatggatacctcaccctgaacaacggaagtcaagcggtgggacgctcatccttttactgcctggagtacttcccttcgcagatgctaaggactggaaataacttcnnnttcagctataccttcgaggatgtaccttttcacagcagctacgctcacagccagagtttggatcgcttgatgaatcctcttattgatcagtatctgtactacctgnnnagaacgcaaacaacctctggaacaacccaacaatcacggctgnnntttagccaggctgggccttcgtctatgnnncagcaggccnnnaattggctacctgggccctgctaccggcaacagagagtttcaaagactgctaacgacaacaacaacagtaactttgcttggacannngccaccaaatatcatctcaatggccgcgactcgctggtgaatccaggaccagctatggccagtcacaaggacgatgaagaaaaatttttccctatgcacggcnnnctaatatttggcaaacaagggacaggggcaagtaacgtagatttagataatgtaatgattacggatgaagaagagattcgtaccaccaatcctgtggcaacagagcagtatggaactgtggcaactaacttgcagagctcaaatacagctcccgcgactggaactgtcaatagtcagggggccttacctggcatggtgtggcaagatcgtgacgtgtaccttcaaggacctatctgggcaaagattcctcacacggatggacactttcatccttctcctctgatgggaggctttggactgaaacatccgcctcctcaaatcttgatcaaaaatactccggtaccggcaaatcctccgacgactttcagcccggccaagtttgcttcatttatcactcagtactccactggacaggtcagcgtggaaattgagtgggagctacagaaagaaaacagcaaacgttggaatccagagattcagtacacttccaactacaacaagtctgttaatgtggactttactgtagacactaatggtgtttatagtgaacctcgccctattggaacccggtatctcacacgaaacttg

SEQ ID NO: 2205 - protein, 736 aa, Artificial Sequence; identical to SEQ ID NO: 1913
  Description of Artificial Sequence: Synthetic polypeptide

SEQ ID NO: 2206 - protein, 736 aa, Artificial Sequence; identical to SEQ ID NO: 1914
  Description of Artificial Sequence: Synthetic polypeptide

SEQ ID NO: 2207 - protein, 736 aa, Artificial Sequence; identical to SEQ ID NO: 1915
  Description of Artificial Sequence: Synthetic polypeptide

SEQ ID NO: 2208 - protein, 736 aa, Artificial Sequence; identical to SEQ ID NO: 1916
  Description of Artificial Sequence: Synthetic polypeptide

SEQ ID NO: 2209 - protein, 736 aa, Artificial Sequence; identical to SEQ ID NO: 1917
  Description of Artificial Sequence: Synthetic polypeptide

SEQ ID NO: 2210 - protein, 736 aa, Artificial Sequence; identical to SEQ ID NO: 1918
  Description of Artificial Sequence: Synthetic polypeptide

SEQ ID NO: 2211 - protein, 736 aa, Artificial Sequence; identical to SEQ ID NO: 1919
  Description of Artificial Sequence: Synthetic polypeptide

SEQ ID NO: 2212 - protein, 736 aa, Artificial Sequence; identical to SEQ ID NO: 1920
  Description of Artificial Sequence: Synthetic polypeptide

SEQ ID NO: 2213 - DNA, 2211 bp, Artificial Sequence; identical to SEQ ID NO: 1921
  Description of Artificial Sequence: Synthetic polynucleotide

SEQ ID NO: 2214 - protein, 738 aa, Artificial Sequence; identical to SEQ ID NO: 7
  Description of Artificial Sequence: Synthetic polypeptide

SEQ ID NO: 2215 - protein, 738 aa, Artificial Sequence; identical to SEQ ID NO: 7
  Description of Artificial Sequence: Synthetic polypeptide

SEQ ID NO: 2216 - protein, 738 aa, Artificial Sequence
  Description of Artificial Sequence: Synthetic polypeptide
  misc_feature (157)..(157): Xaa can be any naturally occurring amino acid
  misc_feature (169)..(169): Xaa can be any naturally occurring amino acid
  misc_feature (457)..(457): Xaa can be any naturally occurring amino acid
  misc_feature (463)..(463): Xaa can be any naturally occurring amino acid
  misc_feature (508)..(508): Xaa can be any naturally occurring amino acid
  misc_feature (510)..(511): Xaa can be any naturally occurring amino acid
  misc_feature (558)..(558): Xaa can be any naturally occurring amino acid
  misc_feature (585)..(585): Xaa can be any naturally occurring amino acid
  misc_feature (587)..(587): Xaa can be any naturally occurring amino acid
MAADGYLPDWLEDNLSEGIREWWDLKPGAPKPKANQQKQDDGRGLVLPGYKYLGPFNGLDKGEPVNAADAAALEHDKAYDQQLKAGDNPYLRYNHADAEFQERLQEDTSFGGNLGRAVFQAKKRVLEPLGLVEEGAKTAPGKKRPVEQSPQEPDSSXLGIGKTGQQPAXKRLNFGQTGDSESVPDPQPLGEPPAAPSGVGSNTMASGGGAPMADNNEGADGVGNSSGNWHCDSTWLGDRVITTSTRTWALPTYNNHLYKQISNGTSGGSTNDNTYFGYSTPWGYFDFNRFHCHFSPRDWQRLINNNWGFRPKRLNFKLFNIQVKEVTTNEGTKTIANNLTSTVQVFTDSEYQLPYVLGSAHQGCLPPFPADVFMIPQYGYLTLNNGSQAVGRSSFYCLEYFPSQMLRTGNNFQFSYTFEDVPFHSSYAHSQSLDRLMNPLIDQYLYYLSRTQTTGTXGTQTLXFSQAGPSSMANQARNWVPGPCYRQQRVSTTTNQNNNSNFAWTGAXKXXLNGRDSLMNPGVAMASHKDDEDRFFPSSGVLIFGKQGAGNDNVDYSXVMITNEEEIKTTNPVATEEYGAVATNXQXLANTQAQTGLVHNQGVLPGMVWQNRDVYLQGPIWAKIPHTDGNFHPSPLMGGFGLKHPPPQILIKNTPVPADPPTTFNQAKLNSFITQYSTGQVSVEIEWELQKENSKRWNPEIQYTSNYYKSTNVDFAVNTEGVYSEPRPIGTRYLTRNL

SEQ ID NO: 2217 - DNA, 2211 bp, Artificial Sequence
  Description of Artificial Sequence: Synthetic polynucleotide
  misc_feature (469)..(471): n is a, c, g, or t
  misc_feature (502)..(504): n is a, c, g, or t
  misc_feature (1366)..(1368): n is a, c, g, or t
  misc_feature (1384)..(1386): n is a, c, g, or t
  misc_feature (1519)..(1521): n is a, c, g, or t
  misc_feature (1525)..(1530): n is a, c, g, or t
  misc_feature (1669)..(1671): n is a, c, g, or t
  misc_feature (1750)..(1752): n is a, c, g, or t
  misc_feature (1756)..(1758): n is a, c, g, or t
atggctgccgatggttatcttccagattggctcgaggacaacctctctgagggcattcgcgagtggtgggacttgaaacctggagccccgaaacccaaagccaaccagcaaaagcaggacgacggccggggtctggtgcttcctggctacaagtacctcggacccttcaacggactcgacaagggggagcccgtcaacgcggcggacgcagcggccctcgagcacgacaaagcctacgaccagcagctcaaagcgggtgacaatccgtacctgcggtataatcacgccgacgccgagtttcaggagcgtctgcaagaagatacgtcttttgggggcaacctcgggcgagcagtcttccaggccaagaagcgggttctcgaacctctcggtctggttgaggaaggcgctaagacggctcctggaaagaagaggccggtagagcagtcgccacaagagccagactcctccnnnggcatcggcaagacaggccagcagcccgctnnnaagagactcaattttggtcagactggcgactcagagtcagtccccgacccacaacctctcggagaacctccagcagccccctcaggtgtgggatctaatacaatggcttcaggcggtggcgctccaatggcagacaataacgaaggcgccgacggagtgggtaattcctcgggaaattggcattgcgattccacatggctgggggacagagtcatcaccaccagcacccgaacctgggccctgcccacctacaacaaccacctctacaagcaaatctccaacggcacctcgggaggaagcaccaacgacaacacctattttggctacagcaccccctgggggtattttgacttcaacagattccactgtcacttttcaccacgtgactggcaacgactcatcaacaacaattggggattccggcccaaaagactcaacttcaagctgttcaacatccaggtcaaggaagtcacgacgaacgaaggcaccaagaccatcgccaataatctcaccagcaccgtgcaggtctttacggactcggagtaccagttaccgtacgtgctaggatccgctcaccagggatgtctgcctccgttcccggcggacgtcttcatgattcctcagtacggctatttaactttaaacaatggaagccaagccgtgggacgttcctccttctactgtctggagtatttcccatcgcagatgctgagaaccggcaacaactttcagttcagctacaccttcgaggacgtgcctttccacagcagctacgcgcacagccagagcctggacaggctgatgaatcccctcatcgaccagtacctgtactacctgtccagaacgcaaacgactggaactnnngggacgcagactctgnnnttcagccaagcgggtcctagctcaatggccaaccaggctagaaattgggtgcccggaccttgctaccggcagcagcgcgtctccacgacaaccaaccagaacaacaacagcaactttgcctggacgggagctnnnaagnnnnnnctgaacggccgagactctctaatgaatccgggcgtggcaatggcttcccacaaggatgacgaggaccgcttcttcccttcgagcggggtcctgatttttggcaagcaaggagccgggaacgataatgtggattacagcnnngtgatgattacaaatgaggaagaaatcaagactaccaaccccgtggccacagaagaatatggagcagtggccaccaacnnncagnnngccaatacgcaggcgcagaccggactcgtgcacaaccagggggtgcttcccggcatggtgtggcagaatagagacgtgtacctgcagggtcccatctgggccaaaattcctcacacggacggcaactttcacccgtctcccctgatgggcggctttggactgaagcacccgcctcctcaaattctcatcaagaacacaccggttccagcggacccgccgactaccttcaaccaggccaagctgaactctttcatcacgcagtacagcaccggacaggtcagcgtggaaatcgagtgggagctgcagaaagaaaacagcaaacgctggaatccagagattcaatacacttccaactactacaaatctacaaatgtggactttgctgtcaacacggagggggtttatagcgagcctcgccccattggcacccgttacctcacccgcaacctgtaa

SEQ ID NO: 2218 - protein, 733 aa, Artificial Sequence; identical to SEQ ID NO: 423
  Description of Artificial Sequence: Synthetic polypeptide

SEQ ID NO: 2219 - DNA, 4472 bp, Artificial Sequence
  Description of Artificial Sequence: Synthetic polynucleotide
ctccatcactaggggtaaccgcgaagcgcctcccacgctgccgcgtcagcgctgacgtaaattacgtcataggggagtggtcctgtattagctgtcacgtgagtgcttttgcgacattttgcgacaccacgtggccattcatggtatatatggccgagtgagcgagcaggatctccattttgaccgcgaaatttgaacgagcagcagccatgccgggcttctacgagatcgtgcttaaggtgccgagcgacctggacgagcacctgccgggcatttctgactcgtttgtgaactgggtggcagagaaggaatgggagctgcccccggattctgacatggatcggaatctgattgagcaggcacccctgaccgtggccgagaagctacagcgcgacttcctggtccaatggcgccgcgtgagtaaggccccggaggccctcttctttgttcagttcgagaagggcgagtcctacttccacctccatattctggtagagaccacgggggtcaaatccatggtgctgggccgcttcctgagtcagattcgggacaagctggtgcagaccatctaccgcgggatcgagccgaccctgcccaactggttcgcggtgacaaagacgcgtaatggcgccggaggggggaacaaggtggtggacgagtgctacatccccaactacctgctgcccaagactcagcccgagctgcagtgggcgtggactaacatggaggagtatataagcgcgtgcttgaacctggccgagcgcaaacggctcgtggcgcagcacctgacccacgtcagccagacccaggagcagaacaaggagaatctgaacccgaattctgacgcgcctgtcatccggtcaaaaacctccgcgcgctacatggagctggtcgggtggctggtggaccggggcatcacctccgagaagcagtggatccaggaggaccaggcctcgtacatctccttcaacgccgcctccaactcgcggtctcagatcaaggccgcgctggacaatgccggcaagatcatggcgctgaccaaatccgcgcccgactacctggtaggccccgctctgcccgcggacattaaatccaaccgcatctaccgcatcctggagctgaatggctacgaccctgcctacgccggttccgtctttctcggctgggcccagaaaaagtttggcaaaaggaacaccatctggctgtttgggccggccaccacgggcaagaccaacatcgcggaagccatcgcccacgccgtgcccttctacggctgcgtcaactggaccaatgagaactttcccttcaacgattgcgtcgacaagatggtgatctggtgggaggagggcaagatgacggccaaggtcgtggagtccgccaaggccattctcggcggcagcaaggtgcgcgtggaccaaaagtgcaagtcgtccgcccagatcgatcccacccccgtgatcgtcacctccaacaccaacatgtgcgccgtgattgacgggaacagcaccaccttcgagcaccagcagccgttgcaggaccggatgttcaaatttgaacttacccgccgtctggagcacgactttggcaaggtgacaaagcaggaagtcaaagagttcttccgctgggcgcaggatcacgtgaccgaggtggcgcatgagttctacgtcagaaagggtggagctaacaaaagacccgcccccgatgacgcggatataagcgagcccaagcgggcctgcccctcagtcgcggatccatcgacgtcagacgcggaaggagctccggtggactttgccgacaggtaccaaaacaaatgttctcgtcacgcgggcatgcttcagatgctgtttccctgcaaaacatgcgagagaatgaatcagaatttcaacatttgcttcacgcacgggaccagagactgttcagaatgtttccctggcgtgtcagaatctcaaccggtcgtcagaaaaaagacgtatcggaaactctgtgcgattcatcatctgctggggcgggcacccgagattgcttgctcggcctgcgacctggtcaacgtggacctggatgactgtgtttctgagcaataaatgacttaaaccaggtatggctgccgatggttatcttccagattggctcgaggacaacctctctgagggcattcgcgagtggtgggacctgaaacctggagccccgaaacccaaagccaaccagcaaaagcaggacaacggccggggtctggtgcttcctggctacaagtacctcggacccttcaacggactcgacaagggggagcccgtcaacgcggcggacgcagcggccctcgagcacgacaaggcctacgaccagcagctccaagcgggtgacaatccgtacctgcggtataatcacgccgacgccgagtttcaggagcgtctgcaagaagatacgtcttttgggggcaacctcgggcgcgcagtcttccaggccaaaaagcgggttctcgaacctctgggcctggttgaatcgccggttaagacggctcctggaaagaagagaccggtagagccatcaccccagcgctctccagactcctctacgggcatcggcaagaaaggccagcagcccgcaaaaaagagactcaattttgggcagactggcgactcagagtcagtccccgaccctcaaccaatcggagaaccaccagcaggcccctctggtctgggatctggtacaatggctgcaggcggtggcgctccaatggcagacaataacgaaggcgccgacggagtgggtagttcctcaggaaattggcattgcgattccacatggctgggcgacagagtcatcaccaccagcacccgcacctgggccctgcccacctacaacaaccacctctacaagcaaatctccaacgggacctcgggaggaagcaccaacgacaacacctacttcggctacagcaccccctgggggtattttgacttcaacagattccactgccacttttcaccacgtgactggcagcgactcatcaacaacaactggggattccggcccaagaggctcaacttcaagctcttcaacatccaagtcaaggaggtcacgcagaatgaaggcaccaagaccatcgccaataaccttaccagcacgattcaggtctttacggactcggaataccagctcccgtacgtgctcggctcggcgcaccagggctgcctgcctccgttcccggcggacgtcttcatgattcctcagtacgggtacctgactctgaacaatggcagtcaggctgtgggccggtcgtccttctactgcctggagtactttccttctcaaatgctgagaacgggcaacaactttgaattcagctacaacttcgaggacgtgcccttccacagcagctacgcgcacagccagagcctggaccggctgatgaaccctctcatcgaccagtacttgtactacctgtcccggactcaaagcacgggcggtactgcaggaactcagcagttgctattttctcaggccgggcctaacaacatgtcggctcaggccaagaactggctacccggtccctgctaccggcagcaacgcgtctccacgacactgtcgcagaacaacaacagcaactttgcctggacgggtgccaccaagtatcatctgaatggcagagactctctggtgaatcctggcgttgccatggctacccacaaggacgacgaagagcgattttttccatccagcggagtcttaatgtttgggaaacagggagctggaaaagacaacgtggactatagcagcgtgatgctaaccagcgaggaagaaataaagaccaccaacccagtggccacagaacagtacggcgtggtggccgataacctgcaacagcaaaacgccgctcctattgtaggggccgtcaatagtcaaggagccttacctggcatggtgtggcagaaccgggacgtgtacctgcagggtcccatctgggccaagattcctcatacggacggcaactttcatccctcgccgctgatgggaggctttggactgaagcatccgcctcctcagatcctgattaaaaacacacctgttcccgcggatcctccgaccaccttcactaaggccaagctggcttctttcatcacgcagtacagtaccggccaggtcagcgtggagatcgagtgggagctgcagaaggagaacagcaaacgctggaacccagagattcagtacacttccaactactacaaatctacaaatgtggactttgctgtcaatactgagggtacttattccgagcctcgccccattggcacccgttacctcacccgtaatctgtaattacatgttaatcaataaaccggttaattcgtttcagttgaactttggtctcctgtccttcttatcttatcggttaccatagaaactggttacttattaactgcttggtgcgcttcgcgataaaagacttacgtcatcgggttacccctagtgatgga

SEQ ID NO: 2220 - DNA, 2208 bp, Artificial Sequence
  Description of Artificial Sequence: Synthetic polynucleotide
atggctgccgatggttatcttccagattggctcgaggacactctctctgaaggaataagacagtggtggaagctcaaacctggcccaccaccaccaaagcccgcagagcggcataaggacgacagcaggggtcttgtgcttcctgggtacaagtacctcggacccttcaacggactcgacaagggagagccggtcaacgaggcagacgccgcggccctcgagcacgacaaagcctacgaccggcagctcgacagcggagacaacccgtacctcaagtacaaccacgccgacgcggagtttcaggagcgccttaaagaagatacgtcttttgggggcaacctcggacgagcagtcttccaggcgaaaaagagggttcttgaacctctgggcctggttgaggaacctgttaagaaggctccgggaaaaaagaggccggtagagcactctcctgtggagccagactcctcctcgggaaccggaaaggcgggccagcagcctgcaagaaaaagattgaattttggtcagactggagacgcagactcagtacctgacccccagcctctcggacagccaccagcagccccctctggtctgggaactaataccatggctacaggcagtggcgcaccaatggcagacaataacgagggtgccgacggagtgggtaattcctcgggaaattggcattgcgattccacatggatgggcgacagagtcatcaccaccagcacccgaacctgggccctgcccacctacaacaaccacctctacaaacaaatttccagccaatcaggagcctcgaacgacaatcactactttggctacagcaccccttgggggtattttgacttcaacagattccactgccacttttcaccacgtgactggcaaagactcatcaacaacaactggggattccgacccaagagactcaacttcaagctctttaacattcaagtcaaagaggtcacgcagaatgacggtacgacgacgattgccaataaccttaccagcacggttcaggtgtttactgactcggagtaccagctcccgtacgtcctcggctcggcgcatcaaggatgcctcccgccgttcccagcagacgtcttcatggtgccacagtatggatacctcaccctgaacaacgggagtcaggcagtaggacgctcttcattttactgcctggagtactttccttctcagatgctgcgtaccggaaacaactttaccttcagctacacttttgaggacgttcctttccacagcagctacgctcacagccagagtctggaccgtctcatgaatcctctcatcgaccagtacctgtattacttgagcagaacaaacactccaagtggaaccaccacgcagtcaaggcttcagttttctcaggccggagcgagtgacattcgggaccagtctaggaactggcttcctggaccctgttaccgccagcagcgagtatcaaagacatctgcggataacaacaacagtgaatactcgtggactggagctaccaagtaccacctcaatggcagagactctctggtgaatccgggcccggctatggcaagccacaaggacgatgaagaaaagttttttcctcagagcggggttctcatctttgggaagcaaggctcagagaaaacaaatgtggacattgaaaaggtcatgattacagacgaagaggaaatcaggacaaccaatcccgtggctacggagcagtatggttctgtatctaccaacctccagagaggcaacagacaagcagctaccgcagatgtcaacacacaaggcgttcttccaggcatggtctggcaggacagagatgtgtaccttcaggggcccatctgggcaaagattccacacacggacggacattttcacccctctcccctcatgggtggattcggacttaaacaccctcctccacagattctcatcaagaacaccccggtgcctgcgaatccttcgaccaccttcagtgcggcaaagtttgcttccttcatcacacagtactccacgggacaggtcagcgtggagatcgagtgggagctgcagaaggaaaacagcaaacgctggaatcccgaaattcagtacacttccaactacaacaagtctgttaatgtggactttactgtggacactaatggcgtgtattcagagcctcgccccattggcaccagatacctgactcgtaatctgtaa

SEQ ID NO: 2221 - protein, 735 aa, Artificial Sequence
  Description of Artificial Sequence: Synthetic polypeptide
MAADGYLPDWLEDTLSEGIRQWWKLKPGPPPPKPAERHKDDSRGLVLPGYKYLGPFNGLDKGEPVNEADAAALEHDKAYDRQLDSGDNPYLKYNHADAEFQERLKEDTSFGGNLGRAVFQAKKRVLEPLGLVEEPVKKAPGKKRPVEHSPVEPDSSSGTGKAGQQPARKRLNFGQTGDADSVPDPQPLGQPPAAPSGLGTNTMATGSGAPMADNNEGADGVGNSSGNWHCDSTWMGDRVITTSTRTWALPTYNNHLYKQISSQSGASNDNHYFGYSTPWGYFDFNRFHCHFSPRDWQRLINNNWGFRPKRLNFKLFNIQVKEVTQNDGTTTIANNLTSTVQVFTDSEYQLPYVLGSAHQGCLPPFPADVFMVPQYGYLTLNNGSQAVGRSSFYCLEYFPSQMLRTGNNFTFSYTFEDVPFHSSYAHSQSLDRLMNPLIDQYLYYLSRTNTPSGTTTQSRLQFSQAGASDIRDQSRNWLPGPCYRQQRVSKTSADNNNSEYSWTGATKYHLNGRDSLVNPGPAMASHKDDEEKFFPQSGVLIFGKQGSEKTNVDIEKVMITDEEEIRTTNPVATEQYGSVSTNLQRGNRQAATADVNTQGVLPGMVWQDRDVYLQGPIWAKIPHTDGHFHPSPLMGGFGLKHPPPQILIKNTPVPANPSTTFSAAKFASFITQYSTGQVSVEIEWELQKENSKRWNPEIQYTSNYNKSVNVDFTVDTNGVYSEPRPIGTRYLTRNL

SEQ ID NO: 2222 - DNA, 8376 bp, Artificial Sequence
  Description of Artificial Sequence: Synthetic polynucleotide
aattcccatcatcaataatataccttattttggattgaagccaatatgataatgagggggtggagtttgtgacgtggcgcggggcgtgggaacggggcgggtgacgtagtagtctctagagtcctgtattagaggtcacgtgagtgttttgcgacattttgcgacaccatgtggtcacgctgggtatttaagcccgagtgagcacgcagggtctccattttgaagcgggaggtttgaacgcgcagccaccacgccggggttttacgagattgtgattaaggtccccagcgaccttgacgggcatctgcccggcatttctgacagctttgtgaactgggtggccgagaaggaatgggagttgccgccagattctgacatggatctgaatctgattgagcaggcacccctgaccgtggccgagaagctgcagcgcgactttctgacggaatggcgccgtgtgagtaaggccccggaggcccttttctttgtgcaatttgagaagggagagagctacttccacatgcacgtgctcgtggaaaccaccggggtgaaatccatggttttgggacgtttcctgagtcagattcgcgaaaaactgattcagagaatttaccgcgggatcgagccgactttgccaaactggttcgcggtcacaaagaccagaaatggcgccggaggcgggaacaaggtggtggatgagtgctacatccccaattacttgctccccaaaacccagcctgagctccagtgggcgtggactaatatggaacagtatttaagcgcctgtttgaatctcacggagcgtaaacggttggtggcgcagcatctgacgcacgtgtcgcagacgcaggagcagaacaaagagaatcagaatcccaattctgatgcgccggtgatcagatcaaaaacttcagccaggtacatggagctggtcgggtggctcgtggacaaggggattacctcggagaagcagtggatccaggaggaccaggcctcatacatctccttcaatgcggcctccaactcgcggtcccaaatcaaggctgccttggacaatgcgggaaagattatgagcctgactaaaaccgcccccgactacctggtgggccagcagcccgtggaggacatttccagcaatcggatttataaaattttggaactaaacgggtacgatccccaatatgcggcttccgtctttctgggatgggccacgaaaaagttcggcaagaggaacaccatctggctgtttgggcctgcaactaccgggaagaccaacatcgcggaggccatagcccacactgtgcccttctacgggtgcgtaaactggaccaatgagaactttcccttcaacgactgtgtcgacaagatggtgatctggtgggaggaggggaagatgaccgccaaggtcgtggagtcggccaaagccattctcggaggaagcaaggtgcgcgtggaccagaaatgcaagtcctcggcccagatagacccgactcccgtgatcgtcacctccaacaccaacatgtgcgccgtgattgacgggaactcaacgaccttcgaacaccagcagccgttgcaagaccggatgttcaaatttgaactcacccgccgtctggatcatgactttgggaaggtcaccaagcaggaagtcaaagactttttccggtgggcaaaggatcacgtggttgaggtggagcatgaattctacgtcaaaaagggtggagccaagaaaagacccgcccccagtgacgcagatataagtgagcccaaacgggtgcgcgagtcagttgcgcagccatcgacgtcagacgcggaagcttcgatcaactacgcagacaggtaccaaaacaaatgttctcgtcacgtgggcatgaatctgatgctgtttccctgcagacaatgcgagagaatgaatcagaattcaaatatctgcttcactcacggacagaaagactgtttagagtgctttcccgtgtcagaatctcaacccgtttctgtcgtcaaaaaggcgtatcagaaactgtgctacattcatcatatcatgggaaaggtgccagacgcttgcactgcctgcgatctggtcaatgtggatttggatgactgcatctttgaacaataaatgatttaaatcaggtatggctgccgatggttatcttccagattggctcgaggacactctctctgaaggaataagacagtggtggaagctcaaacctggcccaccaccaccaaagcccgcagagcggcataaggacgacagcaggggtcttgtgcttcctgggtacaagtacctcggacccttcaacggactcgacaagggagagccggtcaacgaggcagacgccgcggccctcgagcacgacaaagcctacgaccggcagctcgacagcggagacaacccgtacctcaagtacaaccacgccgacgcggagtttcaggagcgccttaaagaagatacgtcttttgggggcaacctcggacgagcagtcttccaggcgaaaaagagggttcttgaacctctgggcctggttgaggaacctgttaagacggctccgggaaaaaagaggccggtagagcactctcctgtggagccagactcctcctcgggaaccggaaaggcgggccagcagcctgcaagaaaaagattgaattttggtcagactggagacgcagactcagtacctgacccccagcctctcggacagccaccagcagccccctctggtctgggaactaatacgatggctacaggcagtggcgcaccaatggcagacaataacgagggcgccgacggagtgggtaattcctcgggaaattggcattgcgattccacatggatgggcgacagagtcatcaccaccagcacccgaacctgggccctgcccacctacaacaaccacctctacaaacaaatttccagccaatcaggagcctcgaacgacaatcactactttggctacagcaccccttgggggtattttgacttcaacagattccactgccacttttcaccacgtgactggcaaagactcatcaacaacaactggggattccgacccaagagactcaacttcaagctctttaacattcaagtcaaagaggtcacgcagaatgacggtacgacgacgattgccaataaccttaccagcacggttcaggtgtttactgactcggagtaccagctcccgtacgtcctcggctcggcgcatcaaggatgcctcccgccgttcccagcagacgtcttcatggtgccacagtatggatacctcaccctgaacaacgggagtcaggcagtaggacgctcttcattttactgcctggagtactttccttctcagatgctgcgtaccggaaacaactttaccttcagctacacttttgaggacgttcctttccacagcagctacgctcacagccagagtctggaccgtctcatgaatcctctcatcgaccagtacctgtattacttgagcagaacaaacactccaagtggaaccaccacgcagtcaaggcttcagttttctcaggccggagcgagtgacattcgggaccagtctaggaactggcttcctggaccctgttaccgccagcagcgagtatcaaagacatctgcggataacaacaacagtgaatactcgtggactggagctaccaagtaccacctcaatggcagagactctctggtgaatccgggcccggccatggcaagccacaaggacgatgaagaaaagttttttcctcagagcggggttctcatctttgggaagcaaggctcagagaaaacaaatgtggacattgaaaaggtcatgattacagacgaagaggaaatcaggacaaccaatcccgtggctacggagcagtatggttctgtatctaccaacctccagagaggcaacagacaagcagctaccgcagatgtcaacacacaaggcgttcttccaggcatggtctggcaggacagagatgtgtaccttcaggggcccatctgggcaaagattccacacacggacggacattttcacccctctcccctcatgggtggattcggacttaaacaccctcctccacagattctcatcaagaacaccccggtacctgcgaatccttcgaccaccttcagtgcggcaaagtttgcttccttcatcacacagtactccacgggacaggtcagcgtggagatcgagtgggagctgcagaaggaaaacagcaaacgctggaatcccgaaattcagtacacttccaactacaacaagtctgttaatgtggactttactgtggacactaatggcgtgtattcagagcctcgccccattggcaccagatacctgactcgtaatctgtaattgcttgttaatcaataaaccgtttaattcgtttcagttgaactttggtctctgcgtatttctttcttatctagtttccatgctctagagtcctgtattagaggtcacgtgagtgttttgcgacattttgcgacaccatgtggtcacgctgggtatttaagcccgagtgagcacgcagggtctccattttgaagcgggaggtttgaacgcgcagccaccacggcggggttttacgagattgtgattaaggtccccagcgaccttgacgggcatctgcccggcatttctgacagctttgtgaactgggtggccgagaaggaatgggagttgccgccagattctgacatggatctgaatctgattgagcaggcacccctgaccgtggccgagaagctgcatcgctggcgtaatagcgaagaggcccgcaccgatcgcccttcccaacagttgcgcagcctgaatggcgaatggaattccagacgattgagcgtcaaaatgtaggtatttccatgagcgtttttcctgttgcaatggctggcggtaatattgttctggatattaccagcaaggccgatagtttgagttcttctactcaggcaagtgatgttattactaatcaaagaagtattgcgacaacggttaatttgcgtgatggacagactcttttactcggtggcctcactgattataaaaacacttctcaggattctggcgtaccgttcctgtctaaaatccctttaatcggcctcctgtttagctcccgctctgattctaacgaggaaagcacgttatacgtgctcgtcaaagcaaccatagtacgcgccctgtagcggcgcattaagcgcggcgggtgtggtggttacgcgcagcgtgaccgctacacttgccagcgccctagcgcccgctcctttcgctttcttcccttcctttctcgccacgttcgccggctttccccgtcaagctctaaatcgggggctccctttagggttccgatttagtgctttacggcacctcgaccccaaaaaacttgattagggtgatggttcacgtagtgggccatcgccctgatagacggtttttcgccctttgacgttggagtccacgttctttaatagtggactcttgttccaaactggaacaacactcaaccctatctcggtctattcttttgatttataagggattttgccgatttcggcctattggttaaaaaatgagctgatttaacaaaaatttaacgcgaattttaacaaaatattaacgtttacaatttaaatatttgcttatacaatcttcctgtttttggggcttttctgattatcaaccggggtacatatgattgacatgctagttttacgattaccgttcatcgattctcttgtttgctccagactctcaggcaatgacctgatagcctttgtagagacctctcaaaaatagctaccctctccggcatgaatttatcagctagaacggttgaatatcatattgatggtgatttgactgtctccggcctttctcacccgtttgaatctttacctacacattactcaggcattgcatttaaaatatatgagggttctaaaaatttttatccttgcgttgaaataaaggcttctcccgcaaaagtattacagggtcataatgtttttggtacaaccgatttagctttatgctctgaggctttattgcttaattttgctaattctttgccttgcctgtatgatttattggatgttggaattcctgatgcggtattttctccttacgcatctgtgcggtatttcacaccgcatatggtgcactctcagtacaatctgctctgatgccgcatagttaagccagccccgacacccgccaacacccgctgacgcgccctgacgggcttgtctgctcccggcatccgcttacagacaagctgtgaccgtctccgggagctgcatgtgtcagaggttttcaccgtcatcaccgaaacgcgcgagacgaaagggcctcgtgatacgcctatttttataggttaatgtcatgataataatggtttcttagacgtcaggtggcacttttcggggaaatgtgcgcggaacccctatttgtttatttttctaaatacattcaaatatgtatccgctcatgagacaataaccctgataaatgcttcaataatattgaaaaaggaagagtatgagtattcaacatttccgtgtcgcccttattcccttttttgcggcattttgccttcctgtttttgctcacccagaaacgctggtgaaagtaaaagatgctgaagatcagttgggtgcacgagtgggttacatcgaactggatctcaacagcggtaagatccttgagagttttcgccccgaagaacgttttccaatgatgagcacttttaaagttctgctatgtggcgcggtattatcccgtattgacgccgggcaagagcaactcggtcgccgcatacactattctcagaatgacttggttgagtactcaccagtcacagaaaagcatcttacggatggcatgacagtaagagaattatgcagtgctgccataaccatgagtgataacactgcggccaacttacttctgacaacgatcggaggaccgaaggagctaaccgcttttttgcacaacatgggggatcatgtaactcgccttgatcgttgggaaccggagctgaatgaagccataccaaacgacgagcgtgacaccacgatgcctgtagcaatggcaacaacgttgcgcaaactattaactggcgaactacttactctagcttcccggcaacaattaatagactggatggaggcggataaagttgcaggaccacttctgcgctcggcccttccggctggctggtttattgctgataaatctggagccggtgagcgtgggtctcgcggtatcattgcagcactggggccagatggtaagccctcccgtatcgtagttatctacacgacggggagtcaggcaactatggatgaacgaaatagacagatcgctgagataggtgcctcactgattaagcattggtaactgtcagaccaagtttactcatatatactttagattgatttaaaacttcatttttaatttaaaaggatctaggtgaagatcctttttgataatctcatgaccaaaatcccttaacgtgagttttcgttccactgagcgtcagaccccgtagaaaagatcaaaggatcttcttgagatcctttttttctgcgcgtaatctgctgcttgcaaacaaaaaaaccaccgctaccagcggtggtttgtttgccggatcaagagctaccaactctttttccgaaggtaactggcttcagcagagcgcagataccaaatactgtccttctagtgtagccgtagttaggccaccacttcaagaactctgtagcaccgcctacatacctcgctctgctaatcctgttaccagtggctgctgccagtggcgataagtcgtgtcttaccgggttggactcaagacgatagttaccggataaggcgcagcggtcgggctgaacggggggttcgtgcacacagcccagcttggagcgaacgacctacaccgaactgagatacctacagcgtgagctatgagaaagcgccacgcttcccgaagggagaaaggcggacaggtatccggtaagcggcagggtcggaacaggagagcgcacgagggagcttccagggggaaacgcctggtatctttatagtcctgtcgggtttcgccacctctgacttgagcgtcgatttttgtgatgctcgtcaggggggcggagcctatggaaaaacgccagcaacgcggcctttttacggttcctggccttttgctggccttttgctcacatgttctttcctgcgttatcccctgattctgtggataaccgtattaccgcctttgagtgagctgataccgctcgccgcagccgaacgaccgagcgcagcgagtcagtgagcgaggaagcggaagagcgcccaatacgcaaaccgcctctccccgcgcgttggccgattcattaatgca

SEQ ID NO: 2223 - DNA, 1085 bp, Artificial Sequence
  Description of Artificial Sequence: Synthetic polynucleotide
  misc_feature (611)..(611): n is a, c, g, or t
  misc_feature (640)..(640): n is a, c, g, or t
  misc_feature (1039)..(1039): n is a, c, g, or t
tgcccacttacaacaaccatctctacaagcaaatctccagcvvmdcaggagctascaacgacaaccactactttggctacagcaccccttgggggtattttgactttaacagattccactgccacttctcaccacgtgactggcagcgactcattaacaacaactggggattccggcccaagaaactcagcttcaagctcttcaacatccaagttagaggggtcacgcagaacgatggcacgacgactattgccaataaccttaccagcacggttcaagtgtttacggactcggagtatcagctcccgtacgtgctcgggtcggcgcaccaaggctgtctcccgccgtttccagcggacgtcttcatggtccctcagtatggatacctcaccctgaacaacggaagtcaagcggtgggacgctcatccttttactgcctggagtacttcccttcgcagatgctaaggactggaaataacttccaattcagctataccttcgaggatgtaccttttcacagcagctacgctcacagccagagtttggatcgcttgatgaatcctcttattgatcagtatctgtactacctgaacagaacgcaargcamcvcnrgcggaacarccrvcmhsmrsvvsctgvngtttagccaggctgggcctcagtctatgtctttgcaggccagaaattggctacctgggccctgctaccggcaacagagactttcaamarycbmcrvcsrsaacaacaacagtrastttccttggmcagcggccagcamatatcatctcaatggccgcgactcgctggtgaatccaggaccagctatggccagtcacrrggacgatrmsgrsaratttttccctatgcacggcaatctaatatttggcaaasaarrcrscrvsrvarvcratrycgmsdwcgrsvrsgtaatgattacggatgaagaagagattcgtaccaccaatcctgtggcaacagagcagtatggaactgtggcaaataacttgcagrvsvvsmrsrvcvvscccacgdhtvvsrnsgtcvmscatcagggggccttacctggcatggtgtggcaagatcgt

SEQ ID NO: 2224 - protein, 620 aa, Artificial Sequence
  Description of Artificial Sequence: Synthetic polypeptide
  misc_feature (263)..(264): Xaa can be any naturally occurring amino acid
  misc_feature (267)..(267): Xaa can be any naturally occurring amino acid
  misc_feature (450)..(453): Xaa can be any naturally occurring amino acid
  misc_feature (456)..(460): Xaa can be any naturally occurring amino acid
  misc_feature (462)..(462): Xaa can be any naturally occurring amino acid
  misc_feature (491)..(495): Xaa can be any naturally occurring amino acid
  misc_feature (500)..(500): Xaa can be any naturally occurring amino acid
  misc_feature (504)..(504): Xaa can be any naturally occurring amino acid
  misc_feature (508)..(508): Xaa can be any naturally occurring amino acid
  misc_feature (528)..(528): Xaa can be any naturally occurring amino acid
  misc_feature (531)..(533): Xaa can be any naturally occurring amino acid
  misc_feature (546)..(557): Xaa can be any naturally occurring amino acid
  misc_feature (586)..(590): Xaa can be any naturally occurring amino acid
  misc_feature (593)..(595): Xaa can be any naturally occurring amino acid
  misc_feature (597)..(597): Xaa can be any naturally occurring amino acid
MAADGYLPDWLEDNLSEGIREWWALKPGVPQPKANQQHQDNRRGLVLPGYKYLGPGNGLDKGEPVNEADAAALEHDKAYDQQLKAGDNPYLKYNHADAEFQERLQEDTSFGGNLGRAVFQAKKRILEPLGLVEEAAKTAPGKKGAVDQSPQEPDSSSGVGKSGKQPARKRLNFGQTGDSESVPDPQPLGEPPAAPTSLGSNTMASGGGAPMADNNEGADGVGNSSGNWHCDSQWLGDRVITTSTRTWALPTYNNHLYKQISSXXGAXNDNHYFGYSTPWGYFDFNRFHCHFSPRDWQRLINNNWGFRPKKLSFKLFNIQVRGVTQNDGTTTIANNLTSTVQVFTDSEYQLPYVLGSAHQGCLPPFPADVFMVPQYGYLTLNNGSQAVGRSSFYCLEYFPSQMLRTGNNFQFSYTFEDVPFHSSYAHSQSLDRLMNPLIDQYLYYLNRTQXXXXGTXXXXXLXFSQAGPQSMSLQARNWLPGPCYRQQRLSXXXXXNNNSXFPWXAASXYHLNGRDSLVNPGPAMASHXDDXXXFFPMHGNLIFGKXXXXXXXXXXXXVMITDEEEIRTTNPVATEQYGTVANNLQXXXXXPTXXXVXHQGALPGMVWQDRDVYLQGPIWA

SEQ ID NO: 2225 - DNA, 1491 bp, Artificial Sequence
  Description of Artificial Sequence: Synthetic polynucleotide
accaccagcaccagaacctgggccctgcccacttacaacaaccatctctacaagcaaatctccagccaatcaggagcttcaaacgacaaccactactttggctacagcaccccttgggggtattttgactttaacagattccactgccacttctcaccacgtgactggcagcgactcattaacaacaactggggattccggcccaagaaactcagcttcaagctcttcaacatccaagttagaggggtcacgcagaacgatggcacgacgactattgccaataaccttaccagcacggttcaagtgtttacggactcggagtatcagctcccgtacgtgctcgggtcggcgcaccaaggctgtctcccgccgtttccagcggacgtcttcatggtccctcagtatggatacctcaccctgaacaacggaagtcaagcggtgggacgctcatccttttactgcctggagtacttcccttcgcagatgctaaggactggaaataacttccaattcagctataccttcgaggatgtaccttttcacagcagctacgctcacagccagagtttggatcgcttgatgaatcctcttattgatcagtatctgtactacctgaacagaacgcaaggaacaacctctggaacaaccaaccaatcacggctgctttttagccaggctgggcctcagtctatgtctttgcaggccagaaattggctacctgggccctgctaccggcaacagagactttcaaagactgctaacgacaacaacaacagtaactttccttggacagcggccagcaaatatcatctcaatggccgcgactcgctggtgaatccaggaccagctatggccagtcacaaggacgatgaagaaaaatttttccctatgcacggcaatctaatatttggcaaagaagggacaacggcaagtaacgcagaattagataatgtaatgattacggatgaagaagagattcgtaccaccaatcctgtggcaacagagcagtatggaactgtggcaaataacttgcagagctcaaatacagctcccacgactggaactgtcaatcatcagggggccttacctggcatggtgtggcaagatcgtgacgtctaccttcaaggacctatctgggcaaagattcctcacacggatggacactttcatccttctcctctgatgggaggctttggactgaaacatccgcctcctcaaatcatgatcaaaaatactccggtaccggcaaatcctccgacgactttcagcccggccaagtttgcttcatttatcactcagtactccactggacaggtcagcgtggaaattgagtgggagctacagaaagaaaacagcaaacgttggaatccagagattcagtacacttccaactacaacaagtctgttaatgtggactttactgtagacactaatggtgtttatagtgaacctcgccctattggaacccggtatctcacacgaaacttgtga

SEQ ID NO: 2226 - protein, 482 aa, Artificial Sequence
  Description of Artificial Sequence: Synthetic polypeptide
TTSTRTWALPTYNNHLYKQISSQSGASNDNHYFGYSTPWYFDFNRFHCHFSPRDWQRLNNNWGFRPKKLSFKLFNIQRGVTQNDGTTTIANNLTSTQVFTDSEYQLPYVLGSAHQCLPPFPADVFMVPQYGYLTNNGSQAVGRSSFYCLEYFPQMLRTGNNFQFSYTFEDVPHSSYAHSQSLDRLMNPLIDYLYYLNRTQGTTSGTTNQSLLFSQAGPQSMSLQARNWLGPCYRQQRLSKTANDNNNSFPWTAASKYHLNGRDSLVNGPAMASHKDDEEKFFPMHGLIFGKEGTTASNAELDNVMITDEEEIRTTNPVATEQYGTVANNLQSSNTAPTTGTVNHQGALPGMVWQDRDVYLQGPIWAKIPHTDGHFHPSPLMGGFGLKHPPPQIMIKNTPVPANPPTTFSPAKFASFITQYSTGQVSVEIEWELQKENSKRWNPEIQYTSNYNKSVNVDFTVDTNGVYSEPRPIGTRYLTRNL

SEQ ID NO: 2227 - DNA, 1140 bp, Artificial Sequence
  Description of Artificial Sequence: Synthetic polynucleotide
  misc_feature (636)..(636): n is a, c, g, or t
  misc_feature (665)..(665): n is a, c, g, or t
  misc_feature (1064)..(1064): n is a, c, g, or t
accaccagcaccagaacctgggccctgcccacttacaacaaccatctctacaagcaaatctccagcvvmdcaggagctascaacgacaaccactactttggctacagcaccccttgggggtattttgactttaacagattccactgccacttctcaccacgtgactggcagcgactcattaacaacaactggggattccggcccaagaaactcagcttcaagctcttcaacatccaagttagaggggtcacgcagaacgatggcacgacgactattgccaataaccttaccagcacggttcaagtgtttacggactcggagtatcagctcccgtacgtgctcgggtcggcgcaccaaggctgtctcccgccgtttccagcggacgtcttcatggtccctcagtatggatacctcaccctgaacaacggaagtcaagcggtgggacgctcatccttttactgcctggagtacttcccttcgcagatgctaaggactggaaataacttccaattcagctataccttcgaggatgtaccttttcacagcagctacgctcacagccagagtttggatcgcttgatgaatcctcttattgatcagtatctgtactacctgaacagaacgcaargcamcvcnrgcggaacarccrvcmhsmrsvvsctgvngtttagccaggctgggcctcagtctatgtctttgcaggccagaaattggctacctgggccctgctaccggcaacagagactttcaamarycbmcrvcsrsaacaacaacagtrastttccttggmcagcggccagcamatatcatctcaatggccgcgactcgctggtgaatccaggaccagctatggccagtcacrrggacgatrmsgrsaratttttccctatgcacggcaatctaatatttggcaaasaarrcrscrvsrvarvcratrycgmsdwcgrsvrsgtaatgattacggatgaagaagagattcgtaccaccaatcctgtggcaacagagcagtatggaactgtggcaaataacttgcagrvsvvsmrsrvcvvscccacgdhtvvsrnsgtcvmscatcagggggccttacctggcatggtgtggcaagatcgtgacgtctaccttcaaggacctatctgggca

SEQ ID NO: 2228 - protein, 620 aa, Artificial Sequence; identical to SEQ ID NO: 2224
  Description of Artificial Sequence: Synthetic polypeptide
  misc_feature (263)..(264): Xaa can be any naturally occurring amino acid
  misc_feature (267)..(267): Xaa can be any naturally occurring amino acid
  misc_feature (450)..(453): Xaa can be any naturally occurring amino acid
  misc_feature (456)..(460): Xaa can be any naturally occurring amino acid
  misc_feature (462)..(462): Xaa can be any naturally occurring amino acid
  misc_feature (491)..(495): Xaa can be any naturally occurring amino acid
  misc_feature (500)..(500): Xaa can be any naturally occurring amino acid
  misc_feature (504)..(504): Xaa can be any naturally occurring amino acid
  misc_feature (508)..(508): Xaa can be any naturally occurring amino acid
  misc_feature (528)..(528): Xaa can be any naturally occurring amino acid
  misc_feature (531)..(533): Xaa can be any naturally occurring amino acid
  misc_feature (546)..(557): Xaa can be any naturally occurring amino acid
  misc_feature (586)..(590): Xaa can be any naturally occurring amino acid
  misc_feature (593)..(595): Xaa can be any naturally occurring amino acid
  misc_feature (597)..(597): Xaa can be any naturally occurring amino acid

SEQ ID NO: 2229 - protein, 738 aa, Artificial Sequence; identical to SEQ ID NO: 7
  Description of Artificial Sequence: Synthetic polypeptide

SEQ ID NO: 2230 - DNA, 2258 bp, Artificial Sequence
  Description of Artificial Sequence: Synthetic polynucleotide
tcgaggacaacctctctgagggcattcgcgagtggtgggacttgaaacctggagccccgaaacccaaagccaaccagcaaaagcaggacgacggccggggtctggtgcttcctggctacaagtacctcggacccttcaacggactcgacaagggggagcccgtcaacgcggcggacgcagcggccctcgagcacgacaaggcctacgaccagcagctcaaagcgggtgacaatccgtacctgcggtataaccacgccgacgccgagtttcaggagcgtctgcaagaagatacgtcttttgggggcaacctcgggcgagcagtcttccaggccaagaagcgggttctcgaacctctcggtctggttgaggaaggcgctaagacggctcctggaaagaagagaccggtagagccatcaccccagcgttctccagactcctctacgggcatcggcaagaaaggccagcagcccgcgaaaaagagactcaactttgggcagactggcgactcagagtcagtgcccgaccctcaaccaatcggagaaccccccgcaggcccctctggtctgggatctggtacaatggctgcaggcggtggcgctccaatggcagacaataacgaaggcgccgacggagtgggtagttcctcaggaaattggcattgcgattccacatggctgggcgacagagtcatcaccaccagcacccgaacctgggccctccccacctacaacaaccacctctacaagcaaatctccaacgggacttcgggaggaagcaccaacgacaacacctacttcggctacagcaccccctgggggtattttgactttaacagattccactgccacttctcaccacgtgactggcagcgactcatcaacaacaactggggattccggcccaagagactcaacttcaagctcttcaacatccaggtcaaggaggtcacgcagaatgaaggcaccaagaccatcgccaataaccttaccagcacgattcaggtctttacggactcggaataccagctcccgtacgtcctcggctctgcgcaccagggctgcctgcctccgttcccggcggacgtcttcatgattcctcagtacgggtacctgactctgaacaatggcagtcaggccgtgggccgttcctccttctactgcctggagtactttccttctcaaatgctgagaacgggcaacaactttgagttcagctaccagtttgaggacgtgccttttcacagcagctacgcgcacagccaaagcctggaccggctgatgaaccccctcatcgaccagtacctgtactacctgtctcggactcagtccacgggaggtaccgcaggaactcagcagttgctattttctcaggccgggcctaataacatgtcggctcaggccaaaaactggctacccgggccctgctaccggcagcaacgcgtctccacgacactgtcgcaaaataacaacagcaactttgcctggaccggtgccaccaagtatcatctgaatggcagagactctctggtaaatcccggtgtcgctatggcaacccacaaggacgacgaagagcgattttttccgtccagcggagtcttaatgtttgggaaacagggagctggaaaagacaacgtggactatagcagcgttatgctaaccagtgaggaagaaattaaaaccaccaacccagtggccacagaacagtacggcgtggtggccgataacctgcaacagcaaaacgccgctcctattgtaggggccgtcaacagtcaaggagccttacctggcatggtctggcagaaccgggacgtgtacctgcagggtcctatctgggccaagattcctcacacggacggaaactttcatccctcgccgctgatgggaggctttggactgaaacacccgcctcctcagatcctgattaagaatacacctgttcccgcggatcctccaactaccttcagtcaagctaagctggcgtcgttcatcacgcagtacagcaccggacaggtcagcgtggaaattgaatgggagctgcagaaagaaaacagcaaacgctggaacccagagattcaatacacttccaactactacaaatctacaaatgtggactttgctgttaacacagatggcacttattctgagcctcgccccatcggcacccgttacctcacccgtaatctgtaattgcttgttaatcaataaaccggttgattcgtttcagttgaactttggtctctgcgaagggcgaattcgttt

SEQ ID NO: 2231 - DNA, 2208 bp, Artificial Sequence
  Description of Artificial Sequence: Synthetic polynucleotide
atggctgccgatggttatcttccagattggctcgaggacactctctctgaaggaataagacagtggtggaagctcaaacctggcccaccaccaccaaagcccgcagagcggcataaggacgacagcaggggtcttgtgcttcctgggtacaagtacctcggacccttcaacggactcgacaagggagagccggtcaacgaggcagacgccgcggccctcgagcacgacaaagcctacgaccggcagctcgacagcggagacaacccgtacctcaagtacaaccacgccgacgcggagtttcaggagcgccttaaagaagatacgtcttttgggggcaacctcggacgagcagtcttccaggcgaaaaagagggttcttgaacctctgggcctggttgaggaacctgttaagacggctccgggaaaaaagaggccggtagagcactctcctgtggagccagactcctcctcgggaaccggaaaggcgggccagcagcctgcaagaaaaagattgaattttggtcagactggagacgcagactcagtacctgacccccagcctctcggacagccaccagcagccccctctggtctgggaactaatacgatggctacaggcagtggcgcaccaatggcagacaataacgagggcgccgacggagtgggtaattcctcgggaaattggcattgcgattccacatggatgggcgacagagtcatcaccaccagcacccgaacctgggccctgcccacctacaacaaccacctctacaaacaaatttccagccaatcaggagcctcgaacgacaatcactactttggctacagcaccccttgggggtattttgacttcaacagattccactgccacttttcaccacgtgactggcaaagactcatcaacaacaactggggattccgacccaagagactcaacttcaagctctttaacattcaagtcaaagaggtcacgcagaatgacggtacgacgacgattgccaataaccttaccagcacggttcaggtgtttactgactcggagtaccagctcccgtacgtcctcggctcggcgcatcaaggatgcctcccgccgttcccagcagacgtcttcatggtgccacagtatggatacctcaccctgaacaacgggagtcaggcagtaggacgctcttcattttactgcctggagtactttccttctcagatgctgcgtaccggaaacaactttaccttcagctacacttttgaggacgttcctttccacagcagctacgctcacagccagagtctggaccgtctcatgaatcctctcatcgaccagtacctgtatttcttaagcagaacaaacactccaagtggaaccaccacgcagtcaaggcttcagttttctcaggccggagcgagtgacattcgggaccagtctaggaactggcttcctggaccctgttaccgccagcagcgagtatcaaagacatctgcggataacaacaacagtgaattctcgtggaccggtgctaccaagtaccacctcaatggcagagactctctggtgaatccgggcccggccatggcaagccacaaggacgatgaagaaaagttttttcctcagagcggggttctcatctttgggaagcaaggctcagagaaaacaaatgtggacattgaaaaggtcatgattacagacgaagaggaaatcaggacaaccaatcccgtggctacggagcagtatggttctgtatctaccaacctccagagaggcaacagacaagcagctaccgcagatgtcaacacacaaggcgttcttccaggcatggtctggcaggacagagatgtgtaccttcaggggcccatctgggcaaagattccacacacggacggacattttcacccctctcccctcatgggtggattcggacttaaacaccctcctccacagattctcatcaagaacaccccggtacctgcgaatccttcgaccaccttcagtgcggcaaagtttgcttccttcatcacacagtactccacgggacaggtcagcgtggagatcgagtgggagctgcagaaggaaaacagcaaacgctggaatcccgaaattcagtacacttccaactacaacaagtctgttaatgtggactttactgtggacactaatggcgtgtattcagagcctcgccccattggtaccagattcctgactcgtaatctgtaa

SEQ ID NO: 2232 - protein, 737 aa, Artificial Sequence
  Description of Artificial Sequence: Synthetic polypeptide
MAADGYLPDWLEDNLSEGIREWWDLKPGAPKPKANQQKQDNGRGLVLPGYKYLGPFNGLDKGEPVNAADAAALEHDKAYDQQLQAGDNPYLRYNHADAEFQERLQEDTSFGGNLGRAVFQAKKRVLEPLGLVESPVKTAPGKKRPVEPSPQRSPDSSTGIGKKGQQPAKKRLNFGQTGDSESVPDPQPIGEPPAAPSGVGPNTMAAGGGAPMADNNEGADGVGSSSGNWHCDSTWLGDRVITTSTRTWALPTYNNHLYKQISNGTSGGSTNDNTYFGYSTPWGYFDFNRFHCHFSPRDWQRLINNNWGFRPKRLNFKLFNIQVKEVTQNEGTKTIANNLTSTIQVFTDSEYQLPYVLGSAHQGCLPPFPADVFMIPQYGYLTLNNGSQAVGRSSFYCLEYFPSQMLRTGNNFEFSYNFEDVPFHSSYAHSQSLDRLMNPLIDQYLYYLSRTQSTGGTAGTQQLLFSQAGPNNMSAQAKNWLPGPCYRQQRVSTTLSQNNNSNFAWTGATKYHLNGRDSLVNPGVAMATHKDDEERFFPSSGVLMFGKQGAGKDNVDYSSVMLTSEEEIKTTNPVATEQYGWADNLQQQNAAPIVGAVNSQGALPGMVWQNRDVYLQGPIWAKIPHTDGNFHPSPLMGGFGLKHPPPQILIKNTPVPADPPTTFNQAKLASFITQYSTGQVSVEIEWELQKENSKRWNPEIQYTSNYYKSTNVDFAVNTEGTYSEPRPIGTRYLTRNL

SEQ ID NO: 2233 - DNA, 2211 bp, Artificial Sequence
  Description of Artificial Sequence: Synthetic polynucleotide
atggctgccgatggttatcttccagattggctcgaggacactctctctgaaggaataagacagtggtggaagctcaaacctggcccaccaccaccaaagcccgcagagcggcataaggacgacagcaggggtcttgtgcttcctgggtacaagtacctcggacccttcaacggactcgacaagggagagccggtcaacgaggcagacgccgcggccctcgagcacgacaaagcctacgaccggcagctcgacagcggagacaacccgtacctcaagtacaaccacgccgacgcggagtttcaggagcgccttaaagaagatacgtcttttgggggcaacctcggacgagcagtcttccaggcgaaaaagagggttcttgaacctctgggcctggttgaggaacctgttaagacggctccgggaaaaaagaggccggtagagcactctcctgtggagccagactcctcctcgggaaccggaaaggcgggccagcagcctgcaagaaaaagattgaattttggtcagactggagacgcagactcagtacctgacccccagcctctcggacagccaccagcagccccctctggtctgggaactaatacgatggctacaggcagtggcgcaccaatggcagacaataacgagggcgccgacggagtgggtaattcctcgggaaattggcattgcgattccacatggatgggcgacagagtcatcaccaccagcacccgaacctgggccctgcccacctacaacaaccacctctacaaacaaatttccagcgcttcaacgggagcctcgaacgacaatcactactttggctacagcaccccttgggggtattttgacttcaacagattccactgccacttttcaccacgtgactggcaaagactcatcaacaacaactggggattccgacccaagagactcaacttcaagctctttaacattcaagtcaaagaggtcacgcagaatgacggtacgacgacgattgccaataaccttaccagcacggttcaggtgtttactgactcggagtaccagctcccgtacgtcctcggctcggcgcatcaaggatgcctcccgccgttcccagcagacgtcttcatggtgccacagtatggatacctcaccctgaacaacgggagtcaggcagtaggacgctcttcattttactgcctggagtactttccttctcagatgctgcgtaccggaaacaactttaccttcagctacacttttgaggacgttcctttccacagcagctacgctcacagccagagtctggaccgtctcatgaatcctctcatcgaccagtacctgtattacttgagcagaacaaacactccaagtggaaccaccacgcagtcaaggcttcagttttctcaggccggagcgagtgacattcgggaccagtctaggaactggcttcctggaccctgttaccgccagcagcgagtatcaaagacatctgcggataacaacaacagtgaatactcgtggactggagctaccaagtaccacctcaatggcagagactctctggtgaatccgggcccggccatggcaagccacaaggacgatgaagaaaagttttttcctcagagcggggttctcatctttgggaagcaaggctcagagaaaacaaatgtggacattgaaaaggtcatgattacagacgaagaggaaatcaggacaaccaatcccgtggctacggagcagtatggttctgtatctaccaacctccagagaggcaacagacaagcagctaccgcagatgtcaacacacaaggcgttcttccaggcatggtctggcaggacagagatgtgtaccttcaggggcccatctgggcaaagattccacacacggacggacattttcacccctctcccctcatgggtggattcggacttaaacaccctcctccacagattctcatcaagaacaccccggtacctgcgaatccttcgaccaccttcagtgcggcaaagtttgcttccttcatcacacagtactccacgggacaggtcagcgtggagatcgagtgggagctgcagaaggaaaacagcaaacgctggaatcccgaaattcagtacacttccaactacgccaagtctgtcaatgtggactttactgtggacaataatggcgtgtattcagagcctcgccccattggcaccagatacctgactcgtaatctgtaa

SEQ ID NO: 2234 - DNA, 2208 bp, Artificial Sequence
  Description of Artificial Sequence: Synthetic polynucleotide
atggctgccgatggttatcttccagattggctcgaggacaacctctctgagggcattcgcgagtggtgggacttgaaacctggagccccgaagcccaaagccaaccagcaaaagcaggacgacggccggggtctggtgcttcctggctacaagtacctcggacccttcaacggactcgacaagggggagcccgtcaacgcggcggacgcagcggccctcgagcacgacaaggcctacgaccagcagctcaaagcgggtgacaatccgtacctgcggtataaccacgccgacgccgagtttcaggagcgtctgcaagaagatacgtcttttgggggcaacctcgggcgagcagtcttccaggccaagaagcgggttctcgaacctctcggtctggttgaggaaggcgctaagacggctcctggaaagaaacgtccggtagagcagtcgccacaagagccagactcctcctcgggcatcggcaagacaggccagcagcccgctaaaaagagactcaattttggtcagactggcgactcagagtcagtccccgatccacaacctctcggagaacctccagcaacccccgctgctgtgggacctactacaatggcttcaggcggtggcgcaccaatggcagacaataacgaaggcgccgacggagtgggtaatgcctcaggaaattggcattgcgattccacatggctgggcgacagagtcatcaccaccagcacccgcacctgggccttgcccacctacaataaccacctctacaagcaaatctccagtgcttcaggggccagcaacgacaaccactacttcggctacagcaccccctgggggtattttgatttcaacagattccactgccacttttcaccacgtgactggcagcgactcatcaacaacaattggggattccggcccaagagactcaacttcaaactcttcaacatccaagtcaaggaggtcacgacgaatgatggcgtcacaaccatcgctaataaccttaccagcacggttcaagtcttctcggactcggagtaccagcttccgtacgtcctcggctctgcgcaccagggctgcctccctccgttcccggcggacgtgttcatgattccgcaatacggctacctgacgctcaacaatggcagccaagccgtgggacgttcatccttttactgcctggaatatttcccttctcagatgctgagaacgggcaacaactttaccttcagctacacctttgaggaagtgcctttccacagcagctacgcgcacagccagagcctggaccggctgatgaatcctctcatcgaccaatacctgtattacctgaacagaactcaaaatcagtccggaagtgcccaaaacaaggacttgctgtttagccgtgggtctccagctggcatgtctgttcagcccaaaaactggctacctggaccctgttatcggcagcagcgcgtttctaaaacaaaaacagacaacaacaacagcaattttacctggactggtgcttcaaaatataacctcaatgggcgtgaatccatcatcaaccctggcactgctatggcctcacacaaagacgacgaagacaagttctttcccatgagcggtgtcatgatttttggaaaagagagcgccggagcttcaaacactgcattggacaatgtcatgattacagacgaagaggaaattaaagccactaaccctgtggccaccgaaagatttgggaccgtggcagtcaatttccagagcagcagcacagaccctgcgaccggagatgtgcatgctatgggagcattacctggcatggtgtggcaagatagagacgtgtacctgcagggtcccatttgggccaaaattcctcacacagatggacactttcacccgtctcctcttatgggcggctttggactcaagaacccgcctcctcagatcctcatcaaaaacacgcctgttcctgcgaatcctccggcggagttttcagctacaaagtttgcttcattcatcacccaatactccacaggacaagtgagtgtggaaattgaatgggagctgcagaaagaaaacagcaagcgctggaatcccgaagtgcagtacacatccaattatgcaaaatctgccaacgttgattttactgtggacaacaatggactttatactgagcctcgccccattggcacccgttaccttacccgtcccctgtaa

SEQ ID NO: 2235 - DNA, 2205 bp, Artificial Sequence
  Description of Artificial Sequence: Synthetic polynucleotide
atggctgccgatggttatcttccagattggctcgaggacaacctctdgagggcattcgcgagtggtgggacttgaaacctggagccccgaaacccaaagccaaccagcaaaagcaggacgacggccggggtdggtgcttcctggctacaagtacctcggacccttcaacggactcgacaagggggagcccgtcaacgcggcggatgcagcggccctcgagcacgacaaggcctacgaccagcagctcaaagcgggtgacaatccgtacctgcggtataaccacgccgacgccgagtttcaggagcgtctgcaagaagatacgtcttttgggggcaacctcgggcgagcagtcttccaggccaagaagagggttctcgaaccttttggtdggttgaggaaggtgctaagacggctcctggaaagaaacgtccggtagagcagtcgccacaagagccagactcctcctcgggcattggcaagacaggccagcagcccgctaaaaagagactcaattttggtcagactggcgactcagagtcagtccccgacccacaacctctcggagaacctccagcaacccccgctgctgtgggacctactacaatggcttcaggcggtggcgcaccaatggcagacaataacgaaggcgccgacggagtgggtaatgcctcaggaaattggcattgcgattccacatggctgggcgacagagtcatcaccaccagcacccgaacatgggccttgcccacctataacaaccacctctacaagcaaatctccagtgcttcaggggccagcaacgacaaccactacttcggctacagcaccccctgggggtattttgatttcaacagattccactgccatttctcaccacgtgactggcagcgactcatcaacaacaattggggattccggcccaagagactcaacttcaagctcttcaacatccaagtcaaggaggtcacgacgaatgatggcgtcacgaccatcgctaataaccttaccagcacggttcaagtcttctcggactcggagtaccagttgccgtacgtcctcggctctgcgcaccagggctgcctccctccgttcccggcggacgtgttcatgattccgcagtacggctacctaacgctcaacaatggcagccaggcagtgggacggtcatccttttactgcctggaatatttcccatcgcagatgctgagaacgggcaataactttaccttcagctacaccttcgaggacgtgcctttccacagcagctacgcgcacagccagagcctggaccggctgatgaatcctctcatcgaccagtacctgtattacctgaacagaactcagaatcagtccggaagtgcccaaaacaaggacttgctgtttagccgggggtctccagctggcatgtctgttcagcccaaaaactggctacctggaccctgttaccggcagcagcgcgtttctaaaacaaaaacagacaacaacaacagcaactttacctggactggtgcttcaaaatataaccttaatgggcgtgaatctataatcaaccctggcactgctatggcctcacacaaagacgacaaagacaagttctttcccatgagcggtgtcatgatttttggaaaggagagcgccggagcttcaaacactgcattggacaatgtcatgatcacagacgaagaggaaatcaaagccactaaccccgtggccaccgaaagatttgggactgtggcagtcaatctccagagcagcagcacagaccctgcgaccggagatgtgcatgttatgggagccttacctggaatggtgtggcaagacagagacgtatacctgcagggtcctatttgggccaaaattcctcacacggatggacactttcacccgtctcctctcatgggcggctttggacttaagcacccgcctcctcagatcctcatcaaaaacacgcctgttcctgcgaatcctccggcagagttttcggctacaaagtttgcttcattcatcacccagtattccacaggacaagtgagcgtggagattgaatgggagctgcagaaagaaaacagcaaacgctggaatcccgaagtgcagtatacatctaactatgcaaaatctgccaacgttgatttcactgtggacaacaatggactttatactgagcctcgccccattggcacccgttacctcacccgtcccctgtaa

SEQ ID NO: 2236 - DNA, 2208 bp, Artificial Sequence
  Description of Artificial Sequence: Synthetic polynucleotide
atggctgccgatggttatcttccagattggctcgaggacaacctctctgagggcattcgcgagtggtgggacttgaaacctggagccccgaaacccaaagccaaccagcaaaagcaggacgacggccggggtctggtgcttcctggctacaagtacctcggacccttcaacggactcgacaagggggagcccgtcaacgcggcggatgcagcggccctcgagcacgacaaggcctacgaccagcagctcaaagcgggtgacaatccgtacctgcggtataaccacgccgacgccgagtttcaggagcgtctgcaagaagatacgtcttttgggggcaacctcgggcgagcagtcttccaggccaagaagagggttctcgaaccttttggtctggttgaggaaggtgctaagacggctcctggaaagaaacgtccggtagagcagtcgccacaagagccagactcctcctcgggcattggcaagacaggccagcagcccgctaaaaagagactcaattttggtcagactggcgactcagagtcagtccccgacccacaacctctcggagaacctccagcaacccccgctgctgtgggacctactacaatggcttcaggcggtggcgcaccaatggcagacaataacgaaggcgccgacggagtgggtaatgcctcaggaaattggcattgcgattccacatggctgggcgacagagtcatcaccaccagcacccgaacatgggccttgcccacctataacaaccacctctacaagcaaatctccagtgcttcaggggccagcaacgacaaccactacttcggctacagcaccccctgggggtattttgatttcaacagattccactgccatttctcaccacgtgactggcagcgactcatcaacaacaattggggattccggcccaagagactcaacttcaagctcttcaacatccaagtcaaggaggtcacgacgaatgatggcgtcacgaccatcgctaataaccttaccagcacggttcaagtcttctcggactcggagtaccagttgccgtacgtcctcggctctgcgcaccagggctgcctccctccgttcccggcggacgtgttcatgattccgcagtacggctacctaacgctcaacaatggcagccaggcagtgggacggtcatccttttactgcctggaatatttcccatcgcagatgctgagaacgggcaataactttaccttcagctacaccttcgaggacgtgcctttccacagcagctacgcgcacagccagagcctggaccggctgatgaatcctctcatcgaccagtacctgtattacctgaacagaactcagaatcagtccggaagtgcccaaaacaaggacttgctgtttagccgggggtctccagctggcatgtctgttcagcccaaaaactggctacctggaccctgttaccggcagcagcgcgtttctaaaacaaaaacagacaacaacaacagcaactttacctggactggtgcttcaaaatataaccttaatgggcgtgaatctataatcaaccctggcactgctatggcctcacacaaagacgacgaagacaagttctttcccatgagcggtgtcatgatttttggaaaggagagcgccggagcttcaaacactgcattggacaatgtcatgatcacagacgaagaggaaatcaaagccactaaccccgtggccaccgaaagatttgggactgtggcagtcaatctccagagcagcagcacagaccctgcgaccggagatgtgcatgttatgggagccttacctggaatggtgtggcaagacagagacgtatacctgcagggtcctatttgggccaaaattcctcacacggatggacactttcacccgtctcctctcatgggcggctttggacttaagcacccgcctcctcagatcctcatcaaaaacacgcctgttcctgcgaatcctccggcagagttttcggctacaaagtttgcttcattcatcacccagtattccacaggacaagtgagcgtggagattgaatgggagctgcagaaagaaaacagcaaacgctggaatcccgaagtgcagtatacatctaactatgcaaaatctgccaacgttgatttcactgtggacaacaatggactttatactgagcctcgccccattggcacccgttacctcacccgtcccctgtaa

SEQ ID NO: 2237 - DNA, 2208 bp, Artificial Sequence
  Description of Artificial Sequence: Synthetic polynucleotide
atggctgccgatggttatcttccagattggctcgaggacactctctctgaaggaataagacagtggtggaagctcaaacctggcccaccaccaccaaagcccgcagagcggcataaggacgacagcaggggtcttgtgcttcctgggtacaagtacctcggacccttcaacggactcgacaagggagagccggtcaacgaggcagacgccgcggccctcgagcacgacaaagcctacgaccggcagctcgacagcggagacaacccgtacctcaagtacaaccacgccgacgcggagtttcaggagcgccttaaagaagatacgtcttttgggggcaacctcggacgagcagtcttccaggcgaaaaagagggttcttgaacctctgggcctggttgaggaacctgttaagacggctccgggaaaaaagaggccggtagagcactctcctgtggagccagactcctcctcgggaaccggaaaggcgggccagcagcctgcaagaaaaagattgaattttggtcagactggagacgcagactcagtacctgacccccagcctctcggacagccaccagcagccccctctggtctgggaactaatacgatggctacaggcagtggcgcaccaatggcagacaataacgagggcgccgacggagtgggtaattcctcgggaaattggcattgcgattccacatggatgggcgacagagtcatcaccaccagcacccgaacctgggccctgcccacctacaacaaccacctctacaaacaaatttccagccaatcaggagcctcgaacgacaatcactactttggctacagcaccccttgggggtattttgacttcaacagattccactgccacttttcaccacgtgactggcaaagactcatcaacaacaactggggattccgacccaagagactcaacttcaagctctttaacattcaagtcaaagaggtcacgcagaatgacggtacgacgacgattgccaataaccttaccagcacggttcaggtgtttactgactcggagtaccagctcccgtacgtcctcggctcggcgcatcaaggatgcctcccgccgttcccagcagacgtcttcatggtgccacagtatggatacctcaccctgaacaacgggagtcaggcagtaggacgctcttcattttactgcctggagtactttccttctcagatgctgcgtaccggaaacaactttaccttcagctacacttttgaggacgttcctttccacagcagctacgctcacagccagagtctggaccgtctcatgaatcctctcatcgaccagtacctgtattacttgagcagaacaaacactccaagtggaaccaccacgcagtcaaggcttcagttttctgtggccggacccagtaacatggctgtccagggaaggaactggcttcctggaccctgttaccgccagcagcgagtatcaaagacatctgcggataacaacaacagtgaatttgcttggactggagctaccaagtaccacctcaatggcagagactctctggtgaatccgggcccggccatggcaagccacaaggacgatgaagaaaagttttttcctcagagcggggttctcatctttgggaagcaaggctcagagaaaacaaatgtggacattgaaaaggtcatgattacagacgaagaggaaatcaggacaaccaatcccgtggctacggagcagtatggttctgtatctaccaacctccagcaacagaacacagcaccagctaccgcagatgtcaacacacaaggcgttcttccaggcatggtctggcaggacagagatgtgtaccttcaggggcccatctgggcaaagattccacacacggacggacattttcacccctctcccctcatgggtggattcggacttaaacaccctcctccacagattctcatcaagaacaccccggtacctgcgaatccttcgaccaccttcagtgcggcaaagtttgcttccttcatcacacagtactccacgggacaggtcagcgtggagatcgagtgggagctgcagaaggaaaacagcaaacgctggaatcccgaaattcagtacacttccaactacaacaagtctgttaatgtggactttactgtggacactaatggcgtgtattcagagcctcgccccattggcaccagatacctgactcgtaatctgtaa

SEQ ID NO: 2238 - protein, 735 aa, Artificial Sequence
  Description of Artificial Sequence: Synthetic polypeptide
MAADGYLPDWLEDTLSEGIRQWWKLKPGPPPPKPAERHKDDSRGLVLPGYKYLGPFNGLDKGEPVNEADAAALEHDKAYDRQLDSGDNPYLKYNHADAEFQERLKEDTSFGGNLGRAVFQAKKRVLEPLGLVEEPVKTAPGKKRPVEHSPVEPDSSSGTGKAGQQPARKRLNFGQTGDADSVPDPQPLGQPPAAPSGLGTNTMATGSGAPMADNNEGADGVGNSSGNWHCDSTWMGDRVITTSTRTWALPTYNNHLYKQISSQSGASNDNHYFGYSTPWGYFDFNRFHCHFSPRDWQRLINNNWGFRPKRLNFKLFNIQVKEVTQNDGTTTIANNLTSTVQVFTDSEYQLPYVLGSAHQGCLPPFPADVFMVPQYGYLTLNNGSQAVGRSSFYCLEYFPSQMLRTGNNFTFSYTFEDVPFHSSYAHSQSLDRLMNPLIDQYLYYLSRTNTPSGTTTQSRLQFSVAGPSNMAVQGRNWLPGPCYRQQRVSKTSADNNNSEFAWTGATKYHLNGRDSLVNPGPAMASHKDDEEKFFPQSGVLIFGKQGSEKTNVDIEKVMITDEEEIRTTNPVATEQYGSVSTNLQQQNTAPATADVNTQGVLPGMVWQDRDVYLQGPIWAKIPHTDGHFHPSPLMGGFGLKHPPPQILIKNTPVPANPSTTFSAAKFASFITQYSTGQVSVEIEWELQKENSKRWNPEIQYTSNYNKSVNVDFTVDTNGVYSEPRPIGTRYLTRNL

SEQ ID NO: 2239 - DNA, 2208 bp, Artificial Sequence
  Description of Artificial Sequence: Synthetic polynucleotide
atggctgccgatggttatcttccagattggctcgaggacactctctctgaaggaataagacagtggtggaagctcaaacctggcccaccaccaccaaagcccgcagagcggcataaggacgacagcaggggtcttgtgcttcctgggtacaagtacctcggacccttcaacggactcgacaagggagagccggtcaacgaggcagacgccgcggccctcgagcacgacaaagcctacgaccggcagctcgacagcggagacaacccgtacctcaagtacaaccacgccgacgcggagtttcaggagcgccttaaagaagatacgtcttttgggggcaacctcggacgagcagtcttccaggcgaaaaagaggattcttgaacctctgggcctggttgaggaacctgttaagacggctccgggaaaaaagaggccggtagagcactctcctgcggagccagactcctcctcgggaaccggaaagtcgggccagcagcctgcaagaaaaagattgaattttggtcagactggagacgcagactcagtacctgacccccagcctctcggacagccaccagcagccccctctggtctgggaactaatacgatggcttcaggcagtggcgcaccaatggcagacaataacgagggcgccgacggagtgggtaattcctcgggaaattggcattgcgattccacatggatgggcgacagagtcatcaccaccagcacccgaacctgggccctgcccacctacaacaaccacctctacaaacaaatttccagccaatcaggagcctcgaacgacaatcactactttggctacagcaccccttgggggtattttgacttcaacagattccactgccacttttcaccacgtgactggcaaagactcatcaacaacaactggggattccgacccaagagactcagcttcaagctctttaacattcaagtcaaagaggtcacgcagaatgacggtacgacgacgattgccaataaccttaccagcacggttcaggtgtttactgactcggagtaccagctcccgtacgtcctcggctcggcgcatcaaggatgcctcccgccgttcccagcagacgtcttcatggtgccacagtatggatacctcaccctgaacaacgggagtcaggcagtaggacgctcttcattttactgcctggagtactttccttctcagatgctgcgtaccggaaacaactttaccttcagctacacttttgaggacgttcctttccacagcagctacgctcacagccagagtctggaccgtctcatgaatcctctcatcgaccagtacctgtattacttgagcagaacaaacactccaagtggaaccaccacgatgtcaaggcttcagttttctcaggccggagcgagtgacattcgggaccagtctaggaactggcttcctggaccctgttaccgccagcagcgagtatcaaagacagctgcggataacaacaacagtgattactcgtggactggagctaccaagtaccacctcaatggcagagactctctggtgaatccgggcccggccatggcaagccacaaggacgatgaagaaaagtattttcctcagagcggggttctcatctttgggaagcaagactcaggaaaaacaaatgtggacattgaaaaggtcatgattacagacgaagaggaaatcaggacaaccaatcccgtggctacggagcagtatggttctgtatctaccaacctccagagcggcaacacacaagcagctacctcagatgtcaacacacaaggcgttcttccaggcatggtctggcaggacagagatgtgtaccttcaggggcccatctgggcaaagattccacacacggacggacattttcacccctctcccctcatgggtggattcggacttaaacaccctcctccacagattctcatcaagaacaccccggtacctgcgaatccttcgaccaccttcagtgcggcaaagtttgcttccttcatcacacagtactccacgggacaggtcagcgtggagatcgagtgggagctgcagaaggaaaacagcaaacgctggaatcccgaaattcagtacacttccaactacaacaagtctgttaatgtggactttactgtggacactaatggcgtgtattcagagcctcgccccattggcaccagatacctgactcgtaatctgtaa

SEQ ID NO: 2240 - DNA, 2208 bp, Artificial Sequence
  Description of Artificial Sequence: Synthetic polynucleotide
atggctgccgatggttatcttccagattggctcgaggacactctctctgaaggaataagacagtggtggaagctcaaacctggcccaccaccaccaaagcccgcagagcggcataaggacgacagcaggggtcttgtgcttcctgggtacaagtacctcggacccttcaacggactcgacaagggagagccggtcaacgaggcagacgccgcggccctcgagcacgacaaagcctacgaccggcagctcgacagcggagacaacccgtacctcaagtacaaccacgccgacgcggagtttcaggagcgccttaaagaagatacgtcttttgggggcaacctcggacgagcagtcttccaggcgaaaaagaggattcttgaacctctgggcctggttgaggaacctgttaagacggctccgggaaaaaagaggccggtagagcactctcctgcggagccagactcctcctcgggaaccggaaagtcgggccagcagcctgcaagaaaaagattgaattttggtcagactggagacgcagactcagtacctgacccccagcctctcggacagccaccagcagccccctctggtctgggaactaatacgatggcttcaggcagtggcgcaccaatggcagacaataacgagggcgccgacggagtgggtaattcctcgggaaattggcattgcgattccacatggatgggcgacagagtcatcaccaccagcacccgaacctgggccctgcccacctacaacaaccacctctacaaacaaatttccagccaatcaggagcctcgaacgacaatcactactttggctacagcaccccttgggggtattttgacttcaacagattccactgccacttttcaccacgtgactggcaaagactcatcaacaacaactggggattccgacccaagagactcaacttcaagctctttaacattcaagtcaaagaggtcacgcagaatgacggtacgacgacgattgccaataaccttaccagcacggttcaggtgtttactgactcggagtaccagctcccgtacgtcctcggctcggcgcatcaaggatgcctcccgccgttcccagcagacgtcttcatggtgccacagtatggatacctcaccctgaacaacgggagtcaggcagtaggacgctcttcattttactgcctggagtactttccttctcagatgctgcgtaccggaaacaactttaccttcagctacacttttgaggacgttcctttccacagcagctacgctcacagccagagtctggaccgtctcatgaatcctctcatcgaccagtacctgtattacttgagcagaacaaacactccaagtggaaccaccacgatgtcaaggcttcagttttctcaggccggagcgagtgacattcgggaccagtctaggaactggcttcctggaccctgttaccgccagcagcgagtatcaaagacagctgcggataacaacaacagtgattactcgtggactggagctaccaagtaccacctcaatggcagagactctctggtgaatccgggcccggccatggcaagccacaaggacgatgaagaaaagtattttcctcagagcggggttctcatctttgggaagcaagactcaggaaaaacaaatgtggacattgaaaaggtcatgattacagacgaagaggaaatcaggacaaccaatcccgtggctacggagcagtatggttctgtatctaccaacctccagagcggcaacacacaagcagctacctcagatgtcaacacacaaggcgttcttccaggcatggtctggcaggacagagatgtgtaccttcaggggcccatctgggcaaagattccacacacggacggacattttcacccctctcccctcatgggtggattcggacttaaacaccctcctccacagattctcatcaagaacaccccggtacctgcgaatccttcgaccaccttcagtgcggcaaagtttgcttccttcatcacacagtactccacgggacaggtcagcgtggagatcgagtgggagctgcagaaggaaaacagcaaacgctggaatcccgaaattcagtacacttccaactacaacaagtctgttaatgtggactttactgtggacactaatggcgtgtattcagagcctcgccccattggcaccagatacctgactcgtaatctgtaa

SEQ ID NO: 2241 - protein, 735 aa, Artificial Sequence
  Description of Artificial Sequence: Synthetic polypeptide
MAADGYLPDWLEDTLSEGIRQWWKLKPGPPPPKPAERHKDDSRGLVLPGYKYLGPFNGLDKGEPVNEADAAALEHDKAYDRQLDSGDNPYLKYNHADAEFQERLKEDTSFGGNLGRAVFQAKKRILEPLGLVEEPVKTAPGKKRPVEHSPAEPDSSSGTGKSGQQPARKRLNFGQTGDADSVPDPQPLGQPPAAPSGLGTNTMASGSGAPMADNNEGADGVGNSSGNWHCDSTWMGDRVITTSTRTWALPTYNNHLYKQISSQSGASNDNHYFGYSTPWGYFDFNRFHCHFSPRDWQRLINNNWGFRPKRLNFKLFNIQVKEVTQNDGTTTIANNLTSTVQVFTDSEYQLPYVLGSAHQGCLPPFPADVFMVPQYGYLTLNNGSQAVGRSSFYCLEYFPSQMLRTGNNFTFSYTFEDVPFHSSYAHSQSLDRLMNPLIDQYLYYLSRTNTPSGTTTMSRLQFSQAGASDIRDQSRNWLPGPCYRQQRVSKTAADNNNSDYSWTGATKYHLNGRDSLVNPGPAMASHKDDEEKYFPQSGVLIFGKQDSGKTNVDIEKVMITDEEEIRTTNPVATEQYGSVSTNLQSGNTQAATSDVNTQGVLPGMVWQDRDVYLQGPIWAKIPHTDGHFHPSPLMGGFGLKHPPPQILIKNTPVPANPSTTFSAAKFASFITQYSTGQVSVEIEWELQKENSKRWNPEIQYTSNYNKSVNVDFTVDTNGVYSEPRPIGTRYLTRNL

SEQ ID NO: 2242 - protein, 736 aa, Artificial Sequence
  Description of Artificial Sequence: Synthetic polypeptide
MAADGYLPDWLEDNLSEGIREWWDLKPGAPKPKANQQKQDDGRGLVLPGYKYLGPFNGLDKGEPVNAADAAALEHDKAYDQQLKAGDNPYLRYNHADAEFQERLQEDTSFGGNLGRAVFQAKKRVLEPFGLVEEGAKTAPGKKRPVEQSPQEPDSSSGIGKTGQQPAKKRLNFGQTGDSESVPDPQPLGEPPATPAAVGPTTMASGGGAPMADNNEGADGVGNASGNWHCDSTWLGDRVITTSTRTWALPTYNNHLYKQISSASTGASNDNHYFGYSTPWGYFDFNRFHCHFSPRDWQRLINNNWGFRPKRLNFKLFNIQVKEVTTNDGVTTIANNLTSTVQVFSDSEYQLPYVLGSAHQGCLPPFPADVFMIPQYGYLTLNNGSQAVGRSSFYCLEYFPSQMLRTGNNFTFSYTFEDVPFHSSYAHSQSLDRLMNPLIDQYLYFLNRTQNQSGSAQNKDLLFSRGSPAGMSVQPKNWLPGPCYRQQRVSKTKTDNNNSNFTWTGASKYNLNGRESIINPGTAMASHKDDKDKFFPMSGVMIFGKESAGASNTALDNVMITDEEEIKATNPVATERFGTVAVNLQSSSTDPATGDVHVMGALPGMVWQDRDVYLQGPIWAKIPHTDGHFHPSPLMGGFGLKHPPPQILIKNTPVPANPPAEFSATKFASFITQYSTGQVSVEIEWELQKENSKRWNPEVQYTSNYAKSANVDFTVDNNGLYTEPRPIGTRYLTRPL

SEQ ID NO: 2243 - protein, 747 aa, Artificial Sequence
  Description of Artificial Sequence: Synthetic polypeptide
MAADGYLPDWLEDTLSEGIRQWWKLKPGPPPPKPAERHKDDSRGLVLPGYKYLGPFNGLDKGEPVNEADAAALEHDKAYDRQLDSGDNPYLKYNHADAEFQERLKEDTSFGGNLGRAVFQAKKRVLEPLGLVEEPVKTAPGKKRPVEHSPVEPDSSSGTGKAGQQPARKRLNFGQTGDADSVPDPQPLGQPPAAPSGLGTNTMATGSGAPMADNNEGADGVGNSSGNWHCDSTWMGDRVITTSTRTWALPTYNNHLYKQISSQSGASNDNHYFGYSTPWGYFDFNRFHCHFSPRDWQRLINNNWGFRPKRLNFKLFNIQVKEVTQNDGTTTIANNLTSTVQVFTDSEYQLPYVLGSAHQGCLPPFPADVFMVPQYGYLTLNNGSQAVGRSSFYCLEYFPSQMLRTGNNFTFSYTFEDVPFHSSYAHSQSLDRLMNPLIDQYLYYLSRTNTPSGTTTQSRLQFSQAGASDIRDQSRNWLPGPCYRQQRVSKTSADNNNSEYSWTGATKYHLNGRDSLVNPGPAMASHKDDEEKFFPQSGVLIFGKQGSEKTNVDIEKVMITDEEEIRTTNPVATEQYGSVSTNLQRGNAAAGSTPPPMAARQAATADVNTQGVLPGMVWQDRDVYLQGPIWAKIPHTDGHFHPSPLMGGFGLKHPPPQILIKNTPVPANPSTTFSAAKFASFITQYSTGQVSVEIEWELQKENSKRWNPEIQYTSNYNKSVNVDFTVDTNGVYSEPRPIGTRYLTRNL

SEQ ID NO: 2244 - protein, 747 aa, Artificial Sequence
  Description of Artificial Sequence: Synthetic polypeptide
MAADGYLPDWLEDTLSEGIRQWWKLKPGPPPPKPAERHKDDSRGLVLPGYKYLGPFNGLDKGEPVNEADAAALEHDKAYDRQLDSGDNPYLKYNHADAEFQERLKEDTSFGGNLGRAVFQAKKRVLEPLGLVEEPVKTAPGKKRPVEHSPVEPDSSSGTGKAGQQPARKRLNFGQTGDADSVPDPQPLGQPPAAPSGLGTNTMATGSGAPMADNNEGADGVGNSSGNWHCDSTWMGDRVITTSTRTWALPTYNNHLYKQISSQSGASNDNHYFGYSTPWGYFDFNRFHCHFSPRDWQRLINNNWGFRPKRLNFKLFNIQVKEVTQNDGTTTIANNLTSTVQVFTDSEYQLPYVLGSAHQGCLPPFPADVFMVPQYGYLTLNNGSQAVGRSSFYCLEYFPSQMLRTGNNFTFSYTFEDVPFHSSYAHSQSLDRLMNPLIDQYLYYLSRTNTPSGTTTQSRLQFSQAGASDIRDQSRNWLPGPCYRQQRVSKTSADNNNSEYSWTGATKYHLNGRDSLVNPGPAMASHKDDEEKFFPQSGVLIFGKQGSEKTNVDIEKVMITDEEEIRTTNPVATEQYGSVSTNLQRGNAAAGETRAPLAARQAATADVNTQGVLPGMVWQDRDVYLQGPIWAKIPHTDGHFHPSPLMGGFGLKHPPPQILIKNTPVPANPSTTFSAAKFASFITQYSTGQVSVEIEWELQKENSKRWNPEIQYTSNYNKSVNVDFTVDTNGVYSEPRPIGTRYLTRNL

SEQ ID NO: 2245 - protein, 11 aa, Artificial Sequence
  Description of Artificial Sequence: Synthetic polypeptide
AQTLAVPFKAQ

SEQ ID NO: 2246 - protein, 11 aa, Artificial Sequence
  Description of Artificial Sequence: Synthetic polypeptide
AQSVSKPFLAQ

SEQ ID NO: 2247 - protein, 11 aa, Artificial Sequence
  Description of Artificial Sequence: Synthetic polypeptide
AQFTLTTPKAQ

SEQ ID NO: 2248 - protein, 11 aa, Artificial Sequence
  Description of Artificial Sequence: Synthetic polypeptide
DGTLAVPFKAQ

SEQ ID NO: 2249 - protein, 11 aa, Artificial Sequence
  Description of Artificial Sequence: Synthetic polypeptide
ESTLAVPFKAQ

SEQ ID NO: 2250 - protein, 11 aa, Artificial Sequence
  Description of Artificial Sequence: Synthetic polypeptide
GGTLAVPFKAQ

SEQ ID NO: 2251 - protein, 11 aa, Artificial Sequence
  Description of Artificial Sequence: Synthetic polypeptide
AQTLATPFKAQ

SEQ ID NO: 2252 - protein, 11 aa, Artificial Sequence
  Description of Artificial Sequence: Synthetic polypeptide
ATTLATPFKAQ

SEQ ID NO: 2253 - protein, 11 aa, Artificial Sequence
  Description of Artificial Sequence: Synthetic polypeptide
DGTLATPFKAQ

SEQ ID NO: 2254 - protein, 11 aa, Artificial Sequence
  Description of Artificial Sequence: Synthetic polypeptide
GGTLATPFKAQ

SEQ ID NO: 2255 - protein, 11 aa, Artificial Sequence
  Description of Artificial Sequence: Synthetic polypeptide
SGSLAVPFKAQ

SEQ ID NO: 2256 - protein, 11 aa, Artificial Sequence
  Description of Artificial Sequence: Synthetic polypeptide
AQTLAQPFKAQ

SEQ ID NO: 2257 - protein, 11 aa, Artificial Sequence
  Description of Artificial Sequence: Synthetic polypeptide
AQTLQQPFKAQ

SEQ ID NO: 2258 - protein, 11 aa, Artificial Sequence
  Description of Artificial Sequence: Synthetic polypeptide
AQTLSNPFKAQ

SEQ ID NO: 2259 - protein, 11 aa, Artificial Sequence
  Description of Artificial Sequence: Synthetic polypeptide
AQTLAVPFSNP

SEQ ID NO: 2260 - protein, 11 aa, Artificial Sequence
  Description of Artificial Sequence: Synthetic polypeptide
QGTLAVPFKAQ

SEQ ID NO: 2261 - protein, 11 aa, Artificial Sequence
  Description of Artificial Sequence: Synthetic polypeptide
NQTLAVPFKAQ

SEQ ID NO: 2262 - protein, 11 aa, Artificial Sequence
  Description of Artificial Sequence: Synthetic polypeptide
EGSLAVPFKAQ

SEQ ID NO: 2263 - protein, 11 aa, Artificial Sequence
  Description of Artificial Sequence: Synthetic polypeptide
SGNLAVPFKAQ

SEQ ID NO: 2264 - protein, 11 aa, Artificial Sequence
  Description of Artificial Sequence: Synthetic polypeptide
EGTLAVPFKAQ

SEQ ID NO: 2265 - protein, 11 aa, Artificial Sequence
  Description of Artificial Sequence: Synthetic polypeptide
DSTLAVPFKAQ

SEQ ID NO: 2266 - protein, 11 aa, Artificial Sequence
  Description of Artificial Sequence: Synthetic polypeptide
AVTLAVPFKAQ

SEQ ID NO: 2267 - protein, 11 aa, Artificial Sequence
  Description of Artificial Sequence: Synthetic polypeptide
AQTLSTPFKAQ

SEQ ID NO: 2268 - protein, 11 aa, Artificial Sequence
  Description of Artificial Sequence: Synthetic polypeptide
AQTLPQPFKAQ

SEQ ID NO: 2269 - protein, 11 aa, Artificial Sequence
  Description of Artificial Sequence: Synthetic polypeptide
AQTLSQPFKAQ

SEQ ID NO: 2270 - protein, 11 aa, Artificial Sequence
  Description of Artificial Sequence: Synthetic polypeptide
AQTLQLPFKAQ

SEQ ID NO: 2271 - protein, 11 aa, Artificial Sequence
  Description of Artificial Sequence: Synthetic polypeptide
AQTLTMPFKAQ

SEQ ID NO: 2272 - protein, 11 aa, Artificial Sequence
  Description of Artificial Sequence: Synthetic polypeptide
AQTLTTPFKAQ

SEQ ID NO: 2273 - protein, 11 aa, Artificial Sequence
  Description of Artificial Sequence: Synthetic polypeptide
AQYTLSQGWAQ

SEQ ID NO: 2274 - protein, 11 aa, Artificial Sequence
  Description of Artificial Sequence: Synthetic polypeptide
AQMNATKNVAQ

SEQ ID NO: 2275 - protein, 11 aa, Artificial Sequence
  Description of Artificial Sequence: Synthetic polypeptide
AQVSGGHHSAQ

SEQ ID NO: 2276 - protein, 11 aa, Artificial Sequence
  Description of Artificial Sequence: Synthetic polypeptide
AQTLTAPFKAQ

SEQ ID NO: 2277 - protein, 11 aa, Artificial Sequence
  Description of Artificial Sequence: Synthetic polypeptide
AQTLSKPFKAQ

SEQ ID NO: 2278 - protein, 7 aa, Artificial Sequence
  Description of Artificial Sequence: Synthetic polypeptide
QAVRTSL

SEQ ID NO: 2279 - protein, 7 aa, Artificial Sequence
  Description of Artificial Sequence: Synthetic polypeptide
LAKERLS

SEQ ID NO: 2280 - protein, 7 aa, Artificial Sequence
  Description of Artificial Sequence: Synthetic polypeptide
MNSTKNV

SEQ ID NO: 2281 - protein, 7 aa, Artificial Sequence
  Description of Artificial Sequence: Synthetic polypeptide
VSGGHHS

SEQ ID NO: 2282 - protein, 14 aa, Artificial Sequence
  Description of Artificial Sequence: Synthetic polypeptide
SAQTLAVPFKAQAQ

SEQ ID NO: 2283 - protein, 14 aa, Artificial Sequence
  Description of Artificial Sequence: Synthetic polypeptide
  misc_feature (2)..(4): Xaa can be any naturally occurring amino acid
SXXXLAVPFKAQAQ

SEQ ID NO: 2284 - protein, 14 aa, Artificial Sequence
  Description of Artificial Sequence: Synthetic polypeptide
  misc_feature (4)..(6): Xaa can be any naturally occurring amino acid
SAQXXXVPFKAQAQ

SEQ ID NO: 2285 - protein, 14 aa, Artificial Sequence
  Description of Artificial Sequence: Synthetic polypeptide
  misc_feature (6)..(8): Xaa can be any naturally occurring amino acid
SAQTLXXXFKAQAQ

SEQ ID NO: 2286 - protein, 14 aa, Artificial Sequence
  Description of Artificial Sequence: Synthetic polypeptide
  misc_feature (8)..(10): Xaa can be any naturally occurring amino acid
SAQTLAVXXXAQAQ

SEQ ID NO: 2287 - protein, 14 aa, Artificial Sequence
  Description of Artificial Sequence: Synthetic polypeptide
  misc_feature (10)..(12): Xaa can be any naturally occurring amino acid
SAQTLAVPFXXXAQ

SEQ ID NO: 2288 - protein, 7 aa, Artificial Sequence
  Description of Artificial Sequence: Synthetic polypeptide
TNHQSAQ

SEQ ID NO: 2289 - protein, 7 aa, Artificial Sequence
  Description of Artificial Sequence: Synthetic polypeptide
AQAQTGW

SEQ ID NO: 2290 - protein, 9 aa, Artificial Sequence
  Description of Artificial Sequence: Synthetic polypeptide
DGTLATPFK

SEQ ID NO: 2291 - protein, 11 aa, Artificial Sequence
  Description of Artificial Sequence: Synthetic polypeptide
  misc_feature (10)..(11): Xaa can be any naturally occurring amino acid
DGTLATPFKXX

SEQ ID NO: 2292 - protein, 8 aa, Artificial Sequence
  Description of Artificial Sequence: Synthetic polypeptide
LAVPFKAQ

SEQ ID NO: 2293 - protein, 6 aa, Artificial Sequence
  Description of Artificial Sequence: Synthetic polypeptide
VPFKAQ

SEQ ID NO: 2294 - protein, 4 aa, Artificial Sequence
  Description of Artificial Sequence: Synthetic polypeptide
FKAQ

SEQ ID NO: 2295 - protein, 6 aa, Artificial Sequence
  Description of Artificial Sequence: Synthetic polypeptide
AQTLAV

SEQ ID NO: 2296 - protein, 8 aa, Artificial Sequence
  Description of Artificial Sequence: Synthetic polypeptide
AQTLAVPF

SEQ ID NO: 2297 - protein, 4 aa, Artificial Sequence
  Description of Artificial Sequence: Synthetic polypeptide
QAVR

SEQ ID NO: 2298 - protein, 4 aa, Artificial Sequence
  Description of Artificial Sequence: Synthetic polypeptide
AVRT

SEQ ID NO: 2299 - protein, 4 aa, Artificial Sequence
  Description of Artificial Sequence: Synthetic polypeptide
VRTS

SEQ ID NO: 2300 - protein, 4 aa, Artificial Sequence
  Description of Artificial Sequence: Synthetic polypeptide
RTSL

SEQ ID NO: 2301 - protein, 5 aa, Artificial Sequence
  Description of Artificial Sequence: Synthetic polypeptide
QAVRT

SEQ ID NO: 2302 - protein, 5 aa, Artificial Sequence
  Description of Artificial Sequence: Synthetic polypeptide
AVRTS

SEQ ID NO: 2303 - protein, 5 aa, Artificial Sequence
  Description of Artificial Sequence: Synthetic polypeptide
VRTSL

SEQ ID NO: 2304 - protein, 6 aa, Artificial Sequence
  Description of Artificial Sequence: Synthetic polypeptide
QAVRTS

SEQ ID NO: 2305 - protein, 6 aa, Artificial Sequence
  Description of Artificial Sequence: Synthetic polypeptide
AVRTSL

SEQ ID NO: 2306 - DNA, 33 bp, Artificial Sequence
  Description of Artificial Sequence: Synthetic polynucleotide
gatgggactttggcggtgccttttaaggcacag

SEQ ID NO: 2307 - DNA, 33 bp, Artificial Sequence
  Description of Artificial Sequence: Synthetic polynucleotide
gatgggacgttggcggtgccttttaaggcacag

SEQ ID NO: 2308 - DNA, 21 bp, Artificial Sequence
  Description of Artificial Sequence: Synthetic polynucleotide
caggcggttaggacgtctttg

SEQ ID NO: 2309 - DNA, 27 bp, Artificial Sequence
  Description of Artificial Sequence: Synthetic polynucleotide
caggtcttcacggactcagactatcag

SEQ ID NO: 2310 - DNA, 32 bp, Artificial Sequence
  Description of Artificial Sequence: Synthetic polynucleotide
caagtaaaacctctacaaatgtggtaaaatcg

SEQ ID NO: 2311 - DNA, 36 bp, Artificial Sequence
  Description of Artificial Sequence: Synthetic polynucleotide
actcatcgaccaatacttgtactatctctctagaac

SEQ ID NO: 2312 - DNA, 26 bp, Artificial Sequence
  Description of Artificial Sequence: Synthetic polynucleotide
ggaagtattccttggttttgaaccca

SEQ ID NO: 2313 - DNA, 23 bp, Artificial Sequence
  Description of Artificial Sequence: Synthetic polynucleotide
ggtcgcggttcttgtttgtggat

SEQ ID NO: 2314 - DNA, 24 bp, Artificial Sequence
  Description of Artificial Sequence: Synthetic polynucleotide
cgaccttgaagcgcatgaactcct

SEQ ID NO: 2315 - DNA, 83 bp, Artificial Sequence
  Description of Artificial Sequence: Synthetic polynucleotide
  misc_feature (42)..(43): n is a, c, g, or t
  misc_feature (45)..(46): n is a, c, g, or t
  misc_feature (48)..(49): n is a, c, g, or t
  misc_feature (51)..(52): n is a, c, g, or t
  misc_feature (54)..(55): n is a, c, g, or t
  misc_feature (57)..(58): n is a, c, g, or t
  misc_feature (60)..(61): n is a, c, g, or t
gtattccttggttttgaacccaaccggtctgcgcctgtgcmnnmnnmnnmnnmnnmnnmnnttgggcactctggtggtttgtc

SEQ ID NO: 2316 - DNA, 64 bp, Artificial Sequence
  Description of Artificial Sequence: Synthetic polynucleotide
  misc_feature (36)..(37): n is a, c, g, or t
  misc_feature (39)..(40): n is a, c, g, or t
  misc_feature (42)..(43): n is a, c, g, or t
gtattccttggttttgaacccaaccggtctgcgcmnnmnnmnnaaaaggcaccgccaaagtttg

SEQ ID NO: 2317 - DNA, 70 bp, Artificial Sequence
  Description of Artificial Sequence: Synthetic polynucleotide
  misc_feature (42)..(43): n is a, c, g, or t
  misc_feature (45)..(46): n is a, c, g, or t
  misc_feature (48)..(49): n is a, c, g, or t
gtattccttggttttgaacccaaccggtctgcgcctgtgcmnnmnnmnncaccgccaaagtttgggcact

SEQ ID NO: 2318 - DNA, 77 bp, Artificial Sequence
  Description of Artificial Sequence: Synthetic polynucleotide
  misc_feature (48)..(49): n is a, c, g, or t
  misc_feature (51)..(52): n is a, c, g, or t
  misc_feature (54)..(55): n is a, c, g, or t
gtattccttggttttgaacccaaccggtctgcgcctgtgccttaaamnnmnnmnncaaagtttgggcactctggtgg

SEQ ID NO: 2319 - DNA, 83 bp, Artificial Sequence
  Description of Artificial Sequence: Synthetic polynucleotide
  misc_feature (54)..(55): n is a, c, g, or t
  misc_feature (57)..(58): n is a, c, g, or t
  misc_feature (60)..(61): n is a, c, g, or t
gtattccttggttttgaacccaaccggtctgcgcctgtgccttaaaaggcacmnnmnnmnnttgggcactctggtggtttgtg

SEQ ID NO: 2320 - DNA, 21 bp, Artificial Sequence
  Description of Artificial Sequence: Synthetic polynucleotide
cttgcgaaggagcggctttcg

SEQ ID NO: 2321 - protein, 10 aa, Artificial Sequence
  Description of Artificial Sequence: Synthetic polypeptide
VNLTWSRASG

SEQ ID NO: 2322 - protein, 14 aa, Artificial Sequence
  Description of Artificial Sequence: Synthetic polypeptide
EFCINHRGYWVCGD

SEQ ID NO: 2323 - protein, 11 aa, Artificial Sequence
  Description of Artificial Sequence: Synthetic polypeptide
EDGQVMDVDLS

SEQ ID NO: 2324 - protein, 9 aa, Artificial Sequence
  Description of Artificial Sequence: Synthetic polypeptide
EKQRNGTLT

SEQ ID NO: 2325 - protein, 17 aa, Artificial Sequence
  Description of Artificial Sequence: Synthetic polypeptide
TYQCRVTHPHLPRALMR

SEQ ID NO: 2326 - protein, 14 aa, Artificial Sequence
  Description of Artificial Sequence: Synthetic polypeptide
RHSTTQPRKTKGSG

SEQ ID NO: 2327 - protein, 13 aa, Artificial Sequence
  Description of Artificial Sequence: Synthetic polypeptide
DSNPRGVSAYLSR

SEQ ID NO: 2328 - protein, 12 aa, Artificial Sequence
  Description of Artificial Sequence: Synthetic polypeptide
TITCLWDLAPSK

SEQ ID NO: 2329 - protein, 10 aa, Artificial Sequence
  Description of Artificial Sequence: Synthetic polypeptide
KTKGSGFFVF

SEQ ID NO: 2330 - protein, 12 aa, Artificial Sequence
  Description of Artificial Sequence: Synthetic polypeptide
THPHLPRALMRS

SEQ ID NO: 2331 - protein, 23 aa, Artificial Sequence
  Description of Artificial Sequence: Synthetic polypeptide
GETYQCRVTHPHLPRALMRSTTK

SEQ ID NO: 2332 - protein, 8 aa, Artificial Sequence
  Description of Artificial Sequence: Synthetic polypeptide
LPRALMRS

SEQ ID NO: 2333 - protein, 8 aa, Artificial Sequence
  Description of Artificial Sequence: Synthetic polypeptide
INHRGYWV

SEQ ID NO: 2334 - protein, 12 aa, Artificial Sequence
  Description of Artificial Sequence: Synthetic polypeptide
CDAGSVRTNAPD

SEQ ID NO: 2335 - protein, 17 aa, Artificial Sequence
  Description of Artificial Sequence: Synthetic polypeptide
AKAVSNLTESRSESLQS

SEQ ID NO: 2336 - protein, 13 aa, Artificial Sequence
  Description of Artificial Sequence: Synthetic polypeptide
SLTGDEFKKVLET

SEQ ID NO: 2337 - protein, 11 aa, Artificial Sequence
  Description of Artificial Sequence: Synthetic polypeptide
REAVAYRFEED

SEQ ID NO: 2338 - protein, 10 aa, Artificial Sequence
  Description of Artificial Sequence: Synthetic polypeptide
INPEIITLDG

SEQ ID NO: 2339 - protein, 15 aa, Artificial Sequence
  Description of Artificial Sequence: Synthetic polypeptide
DISVTGAPVITATYL

SEQ ID NO: 2340 - protein, 12 aa, Artificial Sequence
  Description of Artificial Sequence: Synthetic polypeptide
DISVTGAPVITA

SEQ ID NO: 2341 - protein, 17 aa, Artificial Sequence
  Description of Artificial Sequence: Synthetic polypeptide
PKTVSNLTESSSESVQS

SEQ ID NO: 2342 - protein, 13 aa, Artificial Sequence
  Description of Artificial Sequence: Synthetic polypeptide
SLMGDEFKAVLET

SEQ ID NO: 2343 - protein, 11 aa, Artificial Sequence
  Description of Artificial Sequence: Synthetic polypeptide
QHSVAYTFEED

SEQ ID NO: 2344 - protein, 10 aa, Artificial Sequence
  Description of Artificial Sequence: Synthetic polypeptide
INPEIITRDG

SEQ ID NO: 2345 - protein, 15 aa, Artificial Sequence
  Description of Artificial Sequence: Synthetic polypeptide
DISLTGDPVITASYL

SEQ ID NO: 2346 - protein, 12 aa, Artificial Sequence
  Description of Artificial Sequence: Synthetic polypeptide
DISLTGDPVITA

SEQ ID NO: 2347 - protein, 11 aa, Artificial Sequence
  Description of Artificial Sequence: Synthetic polypeptide
DQSIDFEIDSA

SEQ ID NO: 2348 - protein, 20 aa, Artificial Sequence
  Description of Artificial Sequence: Synthetic polypeptide
KNVSEDLPLPTFSPTLLGDS

SEQ ID NO: 2349 - protein, 11 aa, Artificial Sequence
  Description of Artificial Sequence: Synthetic polypeptide
KNVSEDLPLPT

SEQ ID NO: 2350 - protein, 12 aa, Artificial Sequence
  Description of Artificial Sequence: Synthetic polypeptide
CDSGRVRTDAPD

SEQ ID NO: 2351 - protein, 14 aa, Artificial Sequence
  Description of Artificial Sequence: Synthetic polypeptide
FPEHLLVDFLQSLS

SEQ ID NO: 2352 - protein, 9 aa, Artificial Sequence
  Description of Artificial Sequence: Synthetic polypeptide
DAEFRHDSG

SEQ ID NO: 2353 - protein, 16 aa, Artificial Sequence
  Description of Artificial Sequence: Synthetic polypeptide
HYAAAQWDFGNTMCQL

SEQ ID NO: 2354 - protein, 13 aa, Artificial Sequence
  Description of Artificial Sequence: Synthetic polypeptide
YAAQWDFGNTMCQ

SEQ ID NO: 2355 - protein, 10 aa, Artificial Sequence
  Description of Artificial Sequence: Synthetic polypeptide
RSQKEGLHYT

SEQ ID NO: 2356 - protein, 19 aa, Artificial Sequence
  Description of Artificial Sequence: Synthetic polypeptide
SSRTPSDKPVAHWANPQAE

SEQ ID NO: 2357 - protein, 15 aa, Artificial Sequence
  Description of Artificial Sequence: Synthetic polypeptide
SRTPSDKPVAHWANP

SEQ ID NO: 2358 - protein, 9 aa, Artificial Sequence
  Description of Artificial Sequence: Synthetic polypeptide
SSRTPSDKP

SEQ ID NO: 2359 - protein, 14 aa, Artificial Sequence
  Description of Artificial Sequence: Synthetic polypeptide
NADGNVDYHMNSVP

SEQ ID NO: 2360 - protein, 11 aa, Artificial Sequence
  Description of Artificial Sequence: Synthetic polypeptide
DGNVDYHMNSV

SEQ ID NO: 2361 - protein, 16 aa, Artificial Sequence
  Description of Artificial Sequence: Synthetic polypeptide
RSFKEFLQSSLRALRQ

SEQ ID NO: 2362 - protein, 11 aa, Artificial Sequence
  Description of Artificial Sequence: Synthetic polypeptide
FKEFLQSSLRA

SEQ ID NO: 2363 - protein, 10 aa, Artificial Sequence
  Description of Artificial Sequence: Synthetic polypeptide
QMWAPQWGPD

SEQ ID NO: 2364 - protein, 6 aa, Artificial Sequence
  Description of Artificial Sequence: Synthetic polypeptide
RGNRQA

SEQ ID NO: 2365 - protein, 6 aa, Artificial Sequence
  Description of Artificial Sequence: Synthetic polypeptide
SSSTDP

SEQ ID NO: 2366 - protein, 6 aa, Artificial Sequence
  Description of Artificial Sequence: Synthetic polypeptide
SSNTAP

SEQ ID NO: 2367 - protein, 6 aa, Artificial Sequence
  Description of Artificial Sequence: Synthetic polypeptide
SNSNLP

SEQ ID NO: 2368 - protein, 6 aa, Artificial Sequence
  Description of Artificial Sequence: Synthetic polypeptide
SSTTAP

SEQ ID NO: 2369 - protein, 6 aa, Artificial Sequence
  Description of Artificial Sequence: Synthetic polypeptide
AANTAA

SEQ ID NO: 2370 - protein, 6 aa, Artificial Sequence
  Description of Artificial Sequence: Synthetic polypeptide
QQNTAP

SEQ ID NO: 2371 - protein, 6 aa, Artificial Sequence
  Description of Artificial Sequence: Synthetic polypeptide
SAQAQA

SEQ ID NO: 2372 - protein, 6 aa, Artificial Sequence
  Description of Artificial Sequence: Synthetic polypeptide
QANTGP

SEQ ID NO: 2373 - protein, 6 aa, Artificial Sequence
  Description of Artificial Sequence: Synthetic polypeptide
NATTAP

SEQ ID NO: 2374 - protein, 6 aa, Artificial Sequence
  Description of Artificial Sequence: Synthetic polypeptide
SSTAGP

SEQ ID NO: 2375 - protein, 6 aa, Artificial Sequence
  Description of Artificial Sequence: Synthetic polypeptide
QQNTAA

SEQ ID NO: 2376 - protein, 6 aa, Artificial Sequence
  Description of Artificial Sequence: Synthetic polypeptide
PSTAGP

SEQ ID NO: 2377 - protein, 6 aa, Artificial Sequence
  Description of Artificial Sequence: Synthetic polypeptide
NQNTAP

SEQ ID NO: 2378 - protein, 6 aa, Artificial Sequence
  Description of Artificial Sequence: Synthetic polypeptide
QAANAP

SEQ ID NO: 2379 - protein, 6 aa, Artificial Sequence
  Description of Artificial Sequence: Synthetic polypeptide
SIVGLP

SEQ ID NO: 2380 - protein, 6 aa, Artificial Sequence
  Description of Artificial Sequence: Synthetic polypeptide
AASTAA

SEQ ID NO: 2381 - protein, 6 aa, Artificial Sequence
  Description of Artificial Sequence: Synthetic polypeptide
SQNTTA

SEQ ID NO: 2382 - protein, 6 aa, Artificial Sequence
  Description of Artificial Sequence: Synthetic polypeptide
QQDTAP

SEQ ID NO: 2383 - protein, 6 aa, Artificial Sequence
  Description of Artificial Sequence: Synthetic polypeptide
QTNTGP

SEQ ID NO: 2384 - protein, 6 aa, Artificial Sequence
  Description of Artificial Sequence: Synthetic polypeptide
QTNGAP

SEQ ID NO: 2385 - protein, 6 aa, Artificial Sequence
  Description of Artificial Sequence: Synthetic polypeptide
QQNAAP

SEQ ID NO: 2386 - protein, 6 aa, Artificial Sequence
  Description of Artificial Sequence: Synthetic polypeptide
AANTQA

SEQ ID NO: 2387 - protein, 6 aa, Artificial Sequence
  Description of Artificial Sequence: Synthetic polypeptide
NGRAHA

SEQ ID NO: 2388 - protein, 7 aa, Artificial Sequence
  Description of Artificial Sequence: Synthetic polypeptide
QPEHSST

SEQ ID NO: 2389 - protein, 7 aa, Artificial Sequence
  Description of Artificial Sequence: Synthetic polypeptide
VNTANST

SEQ ID NO: 2390 - protein, 7 aa, Artificial Sequence
  Description of Artificial Sequence: Synthetic polypeptide
HGPMQKS

SEQ ID NO: 2391 - protein, 7 aa, Artificial Sequence
  Description of Artificial Sequence: Synthetic polypeptide
PHKPPLA

SEQ ID NO: 2392 - protein, 7 aa, Artificial Sequence
  Description of Artificial Sequence: Synthetic polypeptide
IKNNEMW

SEQ ID NO: 2393 - protein, 7 aa, Artificial Sequence
  Description of Artificial Sequence: Synthetic polypeptide
RNLDTPM

SEQ ID NO: 2394 - protein, 7 aa, Artificial Sequence
  Description of Artificial Sequence: Synthetic polypeptide
VDSHRQS

SEQ ID NO: 2395 - protein, 7 aa, Artificial Sequence
  Description of Artificial Sequence: Synthetic polypeptide
YDSKTKT

SEQ ID NO: 2396 - protein, 7 aa, Artificial Sequence
  Description of Artificial Sequence: Synthetic polypeptide
SQLPHQK

SEQ ID NO: 2397 - protein, 7 aa, Artificial Sequence
  Description of Artificial Sequence: Synthetic polypeptide
STMQQNT

SEQ ID NO: 2398 - protein, 7 aa, Artificial Sequence
  Description of Artificial Sequence: Synthetic polypeptide
TERYMTQ

SEQ ID NO: 2399 - protein, 7 aa, Artificial Sequence
  Description of Artificial Sequence: Synthetic polypeptide
DASLSTS

SEQ ID NO: 2400 - protein, 7 aa, Artificial Sequence
  Description of Artificial Sequence: Synthetic polypeptide
DLPNKKT

SEQ ID NO: 2401 - protein, 7 aa, Artificial Sequence
  Description of Artificial Sequence: Synthetic polypeptide
DLTAARL

SEQ ID NO: 2402 - protein, 7 aa, Artificial Sequence
  Description of Artificial Sequence: Synthetic polypeptide
EPHQFNY

SEQ ID NO: 2403 - protein, 7 aa, Artificial Sequence
  Description of Artificial Sequence: Synthetic polypeptide
EPQSNHT

SEQ ID NO: 2404 - protein, 7 aa, Artificial Sequence
  Description of Artificial Sequence: Synthetic polypeptide
MSSWPSQ

SEQ ID NO: 2405 - protein, 7 aa, Artificial Sequence
  Description of Artificial Sequence: Synthetic polypeptide
NPKHNAT

SEQ ID NO: 2406 - protein, 7 aa, Artificial Sequence
  Description of Artificial Sequence: Synthetic polypeptide
PDGMRTT

SEQ ID NO: 2407 - protein, 7 aa, Artificial Sequence
  Description of Artificial Sequence: Synthetic polypeptide
PNNNKTT

SEQ ID NO: 2408 - protein, 7 aa, Artificial Sequence
  Description of Artificial Sequence: Synthetic polypeptide
QSTTHDS

SEQ ID NO: 2409 - protein, 7 aa, Artificial Sequence
  Description of Artificial Sequence: Synthetic polypeptide
TGSKQKQ

SEQ ID NO: 2410 - protein, 7 aa, Artificial Sequence
  Description of Artificial Sequence: Synthetic polypeptide
SLKHQAL

SEQ ID NO: 2411 - protein, 7 aa, Artificial Sequence
  Description of Artificial Sequence: Synthetic polypeptide
SPIDGEQ

SEQ ID NO: 2412 - protein, 8 aa, Artificial Sequence
  Description of Artificial Sequence: Synthetic polypeptide
WIFPWIQL

SEQ ID NO: 2413 - protein, 9 aa, Artificial Sequence
  Description of Artificial Sequence: Synthetic polypeptide
CDCRGDCFC

SEQ ID NO: 2414 - protein, 5 aa, Artificial Sequence
  Description of Artificial Sequence: Synthetic polypeptide
CNGRC

SEQ ID NO: 2415 - protein, 7 aa, Artificial Sequence
  Description of Artificial Sequence: Synthetic polypeptide
CPRECES

SEQ ID NO: 2416 - protein, 10 aa, Artificial Sequence
  Description of Artificial Sequence: Synthetic polypeptide
CTTHWGFTLC

SEQ ID NO: 2417 - protein, 9 aa, Artificial Sequence
  Description of Artificial Sequence: Synthetic polypeptide
CGRRAGGSC

SEQ ID NO: 2418 - protein, 9 aa, Artificial Sequence
  Description of Artificial Sequence: Synthetic polypeptide
CKGGRAKDC

SEQ ID NO: 2419 - protein, 9 aa, Artificial Sequence
  Description of Artificial Sequence: Synthetic polypeptide
CVPELGHEC

SEQ ID NO: 2420 - protein, 9 aa, Artificial Sequence
  Description of Artificial Sequence: Synthetic polypeptide
CRRETAWAK

SEQ ID NO: 2421 - protein, 14 aa, Artificial Sequence
  Description of Artificial Sequence: Synthetic polypeptide
VSWFSHRYSPFAVS

SEQ ID NO: 2422 - protein, 13 aa, Artificial Sequence
  Description of Artificial Sequence: Synthetic polypeptide
GYRDGYAGPILYN

SEQ ID NO: 2423 - protein, 7 aa, Artificial Sequence
  Description of Artificial Sequence: Synthetic polypeptide
  misc_feature (1)..(3): Xaa can be any naturally occurring amino acid
  misc_feature (5)..(7): Xaa can be any naturally occurring amino acid
XXXYXXX

SEQ ID NO: 2424 - protein, 4 aa, Artificial Sequence
  Description of Artificial Sequence: Synthetic polypeptide
  misc_feature (2)..(2): Xaa is Glu or Met
YXNW

SEQ ID NO: 2425 - protein, 7 aa, Artificial Sequence
  Description of Artificial Sequence: Synthetic polypeptide
RPLPPLP

SEQ ID NO: 2426 - protein, 7 aa, Artificial Sequence
  Description of Artificial Sequence: Synthetic polypeptide
APPLPPR

SEQ ID NO: 2427 - protein, 12 aa, Artificial Sequence
  Description of Artificial Sequence: Synthetic polypeptide
DVFYPYPYASGS

SEQ ID NO: 2428 - protein, 6 aa, Artificial Sequence
  Description of Artificial Sequence: Synthetic polypeptide
MYWYPY

SEQ ID NO: 2429 - protein, 12 aa, Artificial Sequence
  Description of Artificial Sequence: Synthetic polypeptide
DITWDQLWDLMK

SEQ ID NO: 2430 - protein, 8 aa, Artificial Sequence
  Description of Artificial Sequence: Synthetic polypeptide
  misc_feature (5)..(5): Xaa Gly or Leu
CWDDXWLC

SEQ ID NO: 2431 - protein, 14 aa, Artificial Sequence
  Description of Artificial Sequence: Synthetic polypeptide
EWCEYLGGYLRCYA

SEQ ID NO: 2432 - protein, 14 aa, Artificial Sequence
  Description of Artificial Sequence: Synthetic polypeptide
  misc_feature (2)..(2): Xaa can be any naturally occurring amino acid
  misc_feature (4)..(5): Xaa can be any naturally occurring amino acid
  misc_feature (8)..(8): Xaa can be any naturally occurring amino acid
  misc_feature (11)..(11): Xaa can be any naturally occurring amino acid
  misc_feature (13)..(13): Xaa can be any naturally occurring amino acid
YXCXXGPXTWXCXP

SEQ ID NO: 2433 - protein, 14 aa, Artificial Sequence
  Description of Artificial Sequence: Synthetic polypeptide
IEGPTLRQWLAARA

SEQ ID NO: 2434 - protein, 5 aa, Artificial Sequence
  Description of Artificial Sequence: Synthetic polypeptide
  misc_feature (3)..(4): Xaa can be any naturally occurring amino acid
  misc_feature (5)..(5): Xaa is Tyr, Trp, Phe, or His
LWXXX

SEQ ID NO: 2435 - protein, 7 aa, Artificial Sequence
  Description of Artificial Sequence: Synthetic polypeptide
  misc_feature (1)..(1): Xaa can be any naturally occurring amino acid
  misc_feature (3)..(4): Xaa can be any naturally occurring amino acid
XFXXYLW

SEQ ID NO: 2436 - protein, 13 aa, Artificial Sequence
  Description of Artificial Sequence: Synthetic polypeptide
SSIISHFRWGLCD

SEQ ID NO: 2437 - protein, 13 aa, Artificial Sequence
  Description of Artificial Sequence: Synthetic polypeptide
MSRPACPPNDKYE

SEQ ID NO: 2438 - protein, 8 aa, Artificial Sequence
  Description of Artificial Sequence: Synthetic polypeptide
CLRSGRGC

SEQ ID NO: 2439 - protein, 9 aa, Artificial Sequence
  Description of Artificial Sequence: Synthetic polypeptide
CHWMFSPWC

SEQ ID NO: 2440 - protein, 4 aa, Artificial Sequence
  Description of Artificial Sequence: Synthetic polypeptide
  misc_feature (2)..(3): Xaa can be any naturally occurring amino acid
WXXF

SEQ ID NO: 2441 - protein, 8 aa, Artificial Sequence
  Description of Artificial Sequence: Synthetic polypeptide
CSSRLDAC

SEQ ID NO: 2442 - protein, 7 aa, Artificial Sequence
  Description of Artificial Sequence: Synthetic polypeptide
CLPVASC

SEQ ID NO: 2443 - protein, 13 aa, Artificial Sequence
  Description of Artificial Sequence: Synthetic polypeptide
CGFECVRQCPERC

SEQ ID NO: 2444 - protein, 13 aa, Artificial Sequence
  Description of Artificial Sequence: Synthetic polypeptide
CVALCREACGEGC

SEQ ID NO: 2445 - protein, 9 aa, Artificial Sequence
  Description of Artificial Sequence: Synthetic polypeptide
SWCEPGWCR

SEQ ID NO: 2446 - protein, 7 aa, Artificial Sequence
  Description of Artificial Sequence: Synthetic polypeptide
YSGKWGW

SEQ ID NO: 2447 - protein, 7 aa, Artificial Sequence
  Description of Artificial Sequence: Synthetic polypeptide
GLSGGRS

SEQ ID NO: 2448 - protein, 7 aa, Artificial Sequence
  Description of Artificial Sequence: Synthetic polypeptide
LMLPRAD

SEQ ID NO: 2449 - protein, 9 aa, Artificial Sequence
  Description of Artificial Sequence: Synthetic polypeptide
CSCFRDVCC

SEQ ID NO: 2450 - protein, 9 aa, Artificial Sequence
  Description of Artificial Sequence: Synthetic polypeptide
CRDVVSVIC

SEQ ID NO: 2451 - protein, 6 aa, Artificial Sequence
  Description of Artificial Sequence: Synthetic polypeptide
MARSGL

SEQ ID NO: 2452 - protein, 6 aa, Artificial Sequence
  Description of Artificial Sequence: Synthetic polypeptide
MARAKE

SEQ ID NO: 2453 - protein, 6 aa, Artificial Sequence
  Description of Artificial Sequence: Synthetic polypeptide
MSRTMS

SEQ ID NO: 2454 - protein, 6 aa, Artificial Sequence
  Description of Artificial Sequence: Synthetic polypeptide
KCCYSL

SEQ ID NO: 2455 - protein, 14 aa, Artificial Sequence
  Description of Artificial Sequence: Synthetic polypeptide
MYWGDSHWLQYWYE

SEQ ID NO: 2456 - protein, 7 aa, Artificial Sequence
  Description of Artificial Sequence: Synthetic polypeptide
MQLPLAT

SEQ ID NO: 2457 - protein, 4 aa, Artificial Sequence
  Description of Artificial Sequence: Synthetic polypeptide
EWLS

SEQ ID NO: 2458 - protein, 4 aa, Artificial Sequence
  Description of Artificial Sequence: Synthetic polypeptide
SNEW

SEQ ID NO: 2459 - protein, 4 aa, Artificial Sequence
  Description of Artificial Sequence: Synthetic polypeptide
TNYL

SEQ ID NO: 2460 - protein, 12 aa, Artificial Sequence
  Description of Artificial Sequence: Synthetic polypeptide
WDLAWMFRLPVG

SEQ ID NO: 2461 - protein, 13 aa, Artificial Sequence
  Description of Artificial Sequence: Synthetic polypeptide
CTVALPGGYVRVC

SEQ ID NO: 2462 - protein, 13 aa, Artificial Sequence
  Description of Artificial Sequence: Synthetic polypeptide
CVAYCIEHHCWTC

SEQ ID NO: 2463 - protein, 12 aa, Artificial Sequence
  Description of Artificial Sequence: Synthetic polypeptide
CVFAHNYDYLVC

SEQ ID NO: 2464 - protein, 10 aa, Artificial Sequence
  Description of Artificial Sequence: Synthetic polypeptide
CVFTSNYAFC

SEQ ID NO: 2465 - protein, 7 aa, Artificial Sequence
  Description of Artificial Sequence: Synthetic polypeptide
VHSPNKK

SEQ ID NO: 2466 - protein, 7 aa, Artificial Sequence
  Description of Artificial Sequence: Synthetic polypeptide
CRGDGWC

SEQ ID NO: 2467 - protein, 6 aa, Artificial Sequence
  Description of Artificial Sequence: Synthetic polypeptide
  misc_feature (1)..(1): Xaa can be any naturally occurring amino acid
  misc_feature (6)..(6): Xaa can be any naturally occurring amino acid
XRGCDX

SEQ ID NO: 2468 - protein, 4 aa, Artificial Sequence
  Description of Artificial Sequence: Synthetic polypeptide
  misc_feature (2)..(4): Xaa can be any naturally occurring amino acid
PXXX

SEQ ID NO: 2469 - protein, 11 aa, Artificial Sequence
  Description of Artificial Sequence: Synthetic polypeptide
SGKGPRQITAL

SEQ ID NO: 2470 - protein, 14 aa, Artificial Sequence
  Description of Artificial Sequence: Synthetic polypeptide
  misc_feature (10)..(10): Xaa is Ala or Gln
  misc_feature (11)..(11): Xaa is Asn or Ala
  misc_feature (12)..(14): Xaa can be any naturally occurring amino acid
AAAAAAAAAXXXXX

SEQ ID NO: 2471 - protein, 6 aa, Artificial Sequence
  Description of Artificial Sequence: Synthetic polypeptide
VYMSPF

SEQ ID NO: 2472 - protein, 7 aa, Artificial Sequence
  Description of Artificial Sequence: Synthetic polypeptide
ATWLPPR

SEQ ID NO: 2473 - protein, 12 aa, Artificial Sequence
  Description of Artificial Sequence: Synthetic polypeptide
HTMYYHHYQHHL

SEQ ID NO: 2474 - protein, 19 aa, Artificial Sequence
  Description of Artificial Sequence: Synthetic polypeptide
SEVGCRAGPLQWLCEKYFG

SEQ ID NO: 2475 - protein, 18 aa, Artificial Sequence
  Description of Artificial Sequence: Synthetic polypeptide
CGLLPVGRPDRNVWRWLC

SEQ ID NO: 2476 - protein, 15 aa, Artificial Sequence
  Description of Artificial Sequence: Synthetic polypeptide
CKGQCDRFKGLPWEC

SEQ ID NO: 2477 - protein, 5 aa, Artificial Sequence
  Description of Artificial Sequence: Synthetic polypeptide
SGRSA

SEQ ID NO: 2478 - protein, 4 aa, Artificial Sequence
  Description of Artificial Sequence: Synthetic polypeptide
WGFP

SEQ ID NO: 2479 - protein, 17 aa, Artificial Sequence
  Description of Artificial Sequence: Synthetic polypeptide
AEPMPHSLNFSQYLWYT

SEQ ID NO: 2480 - protein, 6 aa, Artificial Sequence
  Description of Artificial Sequence: Synthetic polypeptide
  misc_feature (4)..(4): Xaa is Trp or Phe
WAYXSP

SEQ ID NO: 2481 - protein, 7 aa, Artificial Sequence
  Description of Artificial Sequence: Synthetic polypeptide
IELLQAR

SEQ ID NO: 2482 - protein, 16 aa, Artificial Sequence
  Description of Artificial Sequence: Synthetic polypeptide
AYTKCSRQWRTCMTTH

SEQ ID NO: 2483 - protein, 15 aa, Artificial Sequence
  Description of Artificial Sequence: Synthetic polypeptide
PQNSKIPGPTFLDPH

SEQ ID NO: 2484 - protein, 15 aa, Artificial Sequence
  Description of Artificial Sequence: Synthetic polypeptide
SMEPALPDWWWKMFK

SEQ ID NO: 2485 - protein, 16 aa, Artificial Sequence
  Description of Artificial Sequence: Synthetic polypeptide
ANTPCGPYTHDCPVKR

SEQ ID NO: 2486 - protein, 12 aa, Artificial Sequence
  Description of Artificial Sequence: Synthetic polypeptide
TACHQHVRMVRP

SEQ ID NO: 2487 - protein, 12 aa, Artificial Sequence
  Description of Artificial Sequence: Synthetic polypeptide
VPWMEPAYQRFL

SEQ ID NO: 2488 - protein, 8 aa, Artificial Sequence
  Description of Artificial Sequence: Synthetic polypeptide
DPRATPGS

SEQ ID NO: 2489 - protein, 12 aa, Artificial Sequence
  Description of Artificial Sequence: Synthetic polypeptide
FRPNRAQDYNTN

SEQ ID NO: 2490 - protein, 9 aa, Artificial Sequence
  Description of Artificial Sequence: Synthetic polypeptide
CTKNSYLMC

SEQ ID NO: 2491 - protein, 11 aa, Artificial Sequence
  Description of Artificial Sequence: Synthetic polypeptide
  misc_feature (2)..(2): Xaa is Gln or Arg
  misc_feature (3)..(3): Xaa is Leu or Arg
  misc_feature (5)..(5): Xaa is Gly or Asn
  misc_feature (6)..(7): Xaa is any amino acid residue
  misc_feature (9)..(9): Xaa iis Ala or Val
CXXTXXXGXGC

SEQ ID NO: 2492 - protein, 9 aa, Artificial Sequence
  Description of Artificial Sequence: Synthetic polypeptide
CPIEDRPMC

SEQ ID NO: 2493 - protein, 12 aa, Artificial Sequence
  Description of Artificial Sequence: Synthetic polypeptide
HEWSYLAPYPWF

SEQ ID NO: 2494 - protein, 9 aa, Artificial Sequence
  Description of Artificial Sequence: Synthetic polypeptide
MCPKHPLGC

SEQ ID NO: 2495 - protein, 15 aa, Artificial Sequence
  Description of Artificial Sequence: Synthetic polypeptide
RMWPSSTVNLSAGRR

SEQ ID NO: 2496 - protein, 20 aa, Artificial Sequence
  Description of Artificial Sequence: Synthetic polypeptide
SAKTAVSQRVWLPSHRGGEP

SEQ ID NO: 2497 - protein, 20 aa, Artificial Sequence
  Description of Artificial Sequence: Synthetic polypeptide
KSREHVNNSACPSKRITAAL

SEQ ID NO: 2498 - protein, 4 aa, Artificial Sequence
  Description of Artificial Sequence: Synthetic polypeptide
EGFR

SEQ ID NO: 2499 - protein, 6 aa, Artificial Sequence
  Description of Artificial Sequence: Synthetic polypeptide
AGLGVR

SEQ ID NO: 2500 - protein, 15 aa, Artificial Sequence
  Description of Artificial Sequence: Synthetic polypeptide
GTRQGHTMRLGVSDG

SEQ ID NO: 2501 - protein, 15 aa, Artificial Sequence
  Description of Artificial Sequence: Synthetic polypeptide
IAGLATPGWSHWLAL

SEQ ID NO: 2502 - protein, 7 aa, Artificial Sequence
  Description of Artificial Sequence: Synthetic polypeptide
SMSIARL

SEQ ID NO: 2503 - protein, 7 aa, Artificial Sequence
  Description of Artificial Sequence: Synthetic polypeptide
HTFEPGV

SEQ ID NO: 2504 - protein, 15 aa, Artificial Sequence
  Description of Artificial Sequence: Synthetic polypeptide
NTSLKRISNKRIRRK

SEQ ID NO: 2505 - protein, 15 aa, Artificial Sequence
  Description of Artificial Sequence: Synthetic polypeptide
LRIKRKRRKRKKTRK

SEQ ID NO: 2506 - DNA, 21 bp, adeno-associated virus 2
  misc_feature (3)..(3): n is a, c, g, or t
  misc_feature (4)..(5): n is a, c or g
  misc_feature (6)..(6): n is a or c
  misc_feature (7)..(7): n is a, g, or t
  misc_feature (13)..(13): n is a or g
  misc_feature (14)..(14): n is g or c
  misc_feature (17)..(17): n is g or c
agnnnnncagganncancaac

SEQ ID NO: 2507 - protein, 7 aa, Artificial Sequence
  Description of Artificial Sequence: Synthetic polypeptide
SDSGASN

SEQ ID NO: 2508 - protein, 7 aa, Artificial Sequence
  Description of Artificial Sequence: Synthetic polypeptide
SPSGASN

SEQ ID NO: 2509 - protein, 7 aa, Artificial Sequence
  Description of Artificial Sequence: Synthetic polypeptide
SHSGASN

SEQ ID NO: 2510 - protein, 7 aa, Artificial Sequence
  Description of Artificial Sequence: Synthetic polypeptide
SRSGASN

SEQ ID NO: 2511 - protein, 7 aa, Artificial Sequence
  Description of Artificial Sequence: Synthetic polypeptide
SKSGASN

SEQ ID NO: 2512 - protein, 7 aa, Artificial Sequence
  Description of Artificial Sequence: Synthetic polypeptide
SNSGASN

SEQ ID NO: 2513 - protein, 7 aa, Artificial Sequence
  Description of Artificial Sequence: Synthetic polypeptide
SGSGASN

SEQ ID NO: 2514 - protein, 7 aa, Artificial Sequence
  Description of Artificial Sequence: Synthetic polypeptide
SASGASN

SEQ ID NO: 2515 - protein, 7 aa, Artificial Sequence
  Description of Artificial Sequence: Synthetic polypeptide
SESGTSN

SEQ ID NO: 2516 - protein, 7 aa, Artificial Sequence
  Description of Artificial Sequence: Synthetic polypeptide
STTGGSN

SEQ ID NO: 2517 - protein, 7 aa, Artificial Sequence
  Description of Artificial Sequence: Synthetic polypeptide
SSAGSTN

SEQ ID NO: 2518 - protein, 6 aa, Artificial Sequence
  Description of Artificial Sequence: Synthetic polypeptide
NNDSQA

SEQ ID NO: 2519 - protein, 6 aa, Artificial Sequence
  Description of Artificial Sequence: Synthetic polypeptide
NNRNQA

SEQ ID NO: 2520 - protein, 6 aa, Artificial Sequence
  Description of Artificial Sequence: Synthetic polypeptide
NNNKQA

SEQ ID NO: 2521 - protein, 6 aa, Artificial Sequence
  Description of Artificial Sequence: Synthetic polypeptide
NAKRQA

SEQ ID NO: 2522 - protein, 6 aa, Artificial Sequence
  Description of Artificial Sequence: Synthetic polypeptide
NDEHQA

SEQ ID NO: 2523 - protein, 6 aa, Artificial Sequence
  Description of Artificial Sequence: Synthetic polypeptide
NTSQKA

SEQ ID NO: 2524 - protein, 25 aa, Artificial Sequence
  Description of Artificial Sequence: Synthetic polypeptide
YYLSRTNTPSGTDTQSRLVFSQAGA

SEQ ID NO: 2525 - protein, 25 aa, Artificial Sequence
  Description of Artificial Sequence: Synthetic polypeptide
YYLSRTNTDSGTETQSGLDFSQAGA

SEQ ID NO: 2526 - protein, 25 aa, Artificial Sequence
  Description of Artificial Sequence: Synthetic polypeptide
YYLSRTNTESGTPTQSALEFSQAGA

SEQ ID NO: 2527 - protein, 25 aa, Artificial Sequence
  Description of Artificial Sequence: Synthetic polypeptide
YYLSRTNTHSGTHTQSPLHFSQAGA

SEQ ID NO: 2528 - protein, 25 aa, Artificial Sequence
  Description of Artificial Sequence: Synthetic polypeptide
YYLSRTNTSSGTITISHLIFSQAGA

SEQ ID NO: 2529 - protein, 25 aa, Artificial Sequence
  Description of Artificial Sequence: Synthetic polypeptide
YYLSRTNTRSGIMTKSSLMFSQAGA

SEQ ID NO: 2530 - protein, 25 aa, Artificial Sequence
  Description of Artificial Sequence: Synthetic polypeptide
YYLSRTNTKSGRKTLSNLSFSQAGA

SEQ ID NO: 2531 - protein, 25 aa, Artificial Sequence
  Description of Artificial Sequence: Synthetic polypeptide
YYLSRTNDGSGPVTPSKLRFSQRGA

SEQ ID NO: 2532 - protein, 25 aa, Artificial Sequence
  Description of Artificial Sequence: Synthetic polypeptide
YYLSRTNAASGHATHSDLKFSQPGA

SEQ ID NO: 2533 - protein, 25 aa, Artificial Sequence
  Description of Artificial Sequence: Synthetic polypeptide
YYLSRTNGQAGSLTMSELGFSQVGA

SEQ ID NO: 2534 - protein, 25 aa, Artificial Sequence
  Description of Artificial Sequence: Synthetic polypeptide
YYLSRTNSTGGNQTTSQLLFSQLSA

SEQ ID NO: 2535 - protein, 25 aa, Artificial Sequence
  Description of Artificial Sequence: Synthetic polypeptide
YFLSRTNNNTGLNTNSTLNFSQGRA

SEQ ID NO: 2536 - protein, 16 aa, Artificial Sequence
  Description of Artificial Sequence: Synthetic polypeptide
SKTGADNNNSEYSWTG

SEQ ID NO: 2537 - protein, 16 aa, Artificial Sequence
  Description of Artificial Sequence: Synthetic polypeptide
SKTDADNNNSEYSWTG

SEQ ID NO: 2538 - protein, 16 aa, Artificial Sequence
  Description of Artificial Sequence: Synthetic polypeptide
SKTEADNNNSEYSWTG

SEQ ID NO: 2539 - protein, 16 aa, Artificial Sequence
  Description of Artificial Sequence: Synthetic polypeptide
SKTPADNNNSEYSWTG

SEQ ID NO: 2540 - protein, 16 aa, Artificial Sequence
  Description of Artificial Sequence: Synthetic polypeptide
SKTHADNNNSEYSWTG

SEQ ID NO: 2541 - protein, 16 aa, Artificial Sequence
  Description of Artificial Sequence: Synthetic polypeptide
SKTQADNNNSEYSWTG

SEQ ID NO: 2542 - protein, 16 aa, Artificial Sequence
  Description of Artificial Sequence: Synthetic polypeptide
SKTIADNNNSEYSWTG

SEQ ID NO: 2543 - protein, 16 aa, Artificial Sequence
  Description of Artificial Sequence: Synthetic polypeptide
SKTMADNNNSEYSWTG

SEQ ID NO: 2544 - protein, 16 aa, Artificial Sequence
  Description of Artificial Sequence: Synthetic polypeptide
SKTRADNNNSEYSWTG

SEQ ID NO: 2545 - protein, 16 aa, Artificial Sequence
  Description of Artificial Sequence: Synthetic polypeptide
SKTNADNNNSEYSWTG

SEQ ID NO: 2546 - protein, 16 aa, Artificial Sequence
  Description of Artificial Sequence: Synthetic polypeptide
SKTVGRNNNSEYSWTG

SEQ ID NO: 2547 - protein, 16 aa, Artificial Sequence
  Description of Artificial Sequence: Synthetic polypeptide
SKTADRNNNSEYSWTG

SEQ ID NO: 2548 - protein, 16 aa, Artificial Sequence
  Description of Artificial Sequence: Synthetic polypeptide
SKKLSQNNNSKYSWQG

SEQ ID NO: 2549 - protein, 16 aa, Artificial Sequence
  Description of Artificial Sequence: Synthetic polypeptide
SKPTTGNNNSDYSWPG

SEQ ID NO: 2550 - protein, 16 aa, Artificial Sequence
  Description of Artificial Sequence: Synthetic polypeptide
STQKNENNNSNYSWPG

SEQ ID NO: 2551 - protein, 8 aa, Artificial Sequence
  Description of Artificial Sequence: Synthetic polypeptide
HKDDEGKF

SEQ ID NO: 2552 - protein, 8 aa, Artificial Sequence
  Description of Artificial Sequence: Synthetic polypeptide
HKDDNRKF

SEQ ID NO: 2553 - protein, 8 aa, Artificial Sequence
  Description of Artificial Sequence: Synthetic polypeptide
HKDDTNKF

SEQ ID NO: 2554 - protein, 8 aa, Artificial Sequence
  Description of Artificial Sequence: Synthetic polypeptide
HEDSDKNF

SEQ ID NO: 2555 - protein, 8 aa, Artificial Sequence
  Description of Artificial Sequence: Synthetic polypeptide
HRDGADSF

SEQ ID NO: 2556 - protein, 8 aa, Artificial Sequence
  Description of Artificial Sequence: Synthetic polypeptide
HGDNKSRF

SEQ ID NO: 2557 - protein, 14 aa, Artificial Sequence
  Description of Artificial Sequence: Synthetic polypeptide
KQGSEKTNVDFEEV

SEQ ID NO: 2558 - protein, 14 aa, Artificial Sequence
  Description of Artificial Sequence: Synthetic polypeptide
KQGSEKTNVDSEEV

SEQ ID NO: 2559 - protein, 14 aa, Artificial Sequence
  Description of Artificial Sequence: Synthetic polypeptide
KQGSEKTNVDVEEV

SEQ ID NO: 2560 - protein, 14 aa, Artificial Sequence
  Description of Artificial Sequence: Synthetic polypeptide
KQGSDKTNVDDAGV

SEQ ID NO: 2561 - protein, 14 aa, Artificial Sequence
  Description of Artificial Sequence: Synthetic polypeptide
KQGSSKTNVDPREV

SEQ ID NO: 2562 - protein, 14 aa, Artificial Sequence
  Description of Artificial Sequence: Synthetic polypeptide
KQGSRKTNVDHKQV

SEQ ID NO: 2563 - protein, 14 aa, Artificial Sequence
  Description of Artificial Sequence: Synthetic polypeptide
KQGSKGGNVDTNRV

SEQ ID NO: 2564 - protein, 14 aa, Artificial Sequence
  Description of Artificial Sequence: Synthetic polypeptide
KQGSGEANVDNGDV

SEQ ID NO: 2565 - protein, 14 aa, Artificial Sequence
  Description of Artificial Sequence: Synthetic polypeptide
KQDAAADNIDYDHV

SEQ ID NO: 2566 - protein, 14 aa, Artificial Sequence
  Description of Artificial Sequence: Synthetic polypeptide
KQSGTRSNAAASSV

SEQ ID NO: 2567 - protein, 14 aa, Artificial Sequence
  Description of Artificial Sequence: Synthetic polypeptide
KENTNTNDTELTNV

SEQ ID NO: 2568 - protein, 14 aa, Artificial Sequence
  Description of Artificial Sequence: Synthetic polypeptide
QRGNNVAATADVNT

SEQ ID NO: 2569 - protein, 14 aa, Artificial Sequence
  Description of Artificial Sequence: Synthetic polypeptide
QRGNNEAATADVNT

SEQ ID NO: 2570 - protein, 14 aa, Artificial Sequence
  Description of Artificial Sequence: Synthetic polypeptide
QRGNNPAATADVNT

SEQ ID NO: 2571 - protein, 14 aa, Artificial Sequence
  Description of Artificial Sequence: Synthetic polypeptide
QRGNNHAATADVNT

SEQ ID NO: 2572 - protein, 14 aa, Artificial Sequence
  Description of Artificial Sequence: Synthetic polypeptide
QEENNIAATPGVNT

SEQ ID NO: 2573 - protein, 14 aa, Artificial Sequence
  Description of Artificial Sequence: Synthetic polypeptide
QPPNNMAATHEVNT

SEQ ID NO: 2574 - protein, 14 aa, Artificial Sequence
  Description of Artificial Sequence: Synthetic polypeptide
QHHNNSAATTIVNT

SEQ ID NO: 2575 - protein, 14 aa, Artificial Sequence
  Description of Artificial Sequence: Synthetic polypeptide
QTTNNRAAFNMVET

SEQ ID NO: 2576 - protein, 14 aa, Artificial Sequence
  Description of Artificial Sequence: Synthetic polypeptide
QKKNNNAASKKVAT

SEQ ID NO: 2577 - protein, 14 aa, Artificial Sequence
  Description of Artificial Sequence: Synthetic polypeptide
QGGNNKAADDAVKT

SEQ ID NO: 2578 - protein, 14 aa, Artificial Sequence
  Description of Artificial Sequence: Synthetic polypeptide
QAAKGGAADDAVKT

SEQ ID NO: 2579 - protein, 14 aa, Artificial Sequence
  Description of Artificial Sequence: Synthetic polypeptide
QDDRAAAANESVDT

SEQ ID NO: 2580 - protein, 14 aa, Artificial Sequence
  Description of Artificial Sequence: Synthetic polypeptide
QQQHDDAAYQRVHT

SEQ ID NO: 2581 - protein, 14 aa, Artificial Sequence
  Description of Artificial Sequence: Synthetic polypeptide
QSSSSLAAVSTVQT

SEQ ID NO: 2582 - protein, 14 aa, Artificial Sequence
  Description of Artificial Sequence: Synthetic polypeptide
QNNQTTAAIRNVTT

SEQ ID NO: 2583 - protein, 12 aa, Artificial Sequence
  Description of Artificial Sequence: Synthetic polypeptide
NYNKKSDNVDFT

SEQ ID NO: 2584 - protein, 12 aa, Artificial Sequence
  Description of Artificial Sequence: Synthetic polypeptide
NYNKKSENVDFT

SEQ ID NO: 2585 - protein, 12 aa, Artificial Sequence
  Description of Artificial Sequence: Synthetic polypeptide
NYNKKSLNVDFT

SEQ ID NO: 2586 - protein, 12 aa, Artificial Sequence
  Description of Artificial Sequence: Synthetic polypeptide
NYNKKSPNVDFT

SEQ ID NO: 2587 - protein, 12 aa, Artificial Sequence
  Description of Artificial Sequence: Synthetic polypeptide
NYSKKSHCVDFT

SEQ ID NO: 2588 - protein, 11 aa, Artificial Sequence
  Description of Artificial Sequence: Synthetic polypeptide
NYRKTIYVDFT

SEQ ID NO: 2589 - protein, 11 aa, Artificial Sequence
  Description of Artificial Sequence: Synthetic polypeptide
NYKEKKDVHFT

SEQ ID NO: 2590 - protein, 11 aa, Artificial Sequence
  Description of Artificial Sequence: Synthetic polypeptide
NYGHRAIVQFT

SEQ ID NO: 2591 - protein, 11 aa, Artificial Sequence
  Description of Artificial Sequence: Synthetic polypeptide
NYANHQFVVCT

SEQ ID NO: 2592 - protein, 12 aa, Artificial Sequence
  Description of Artificial Sequence: Synthetic polypeptide
NYDDDPTGVLLT

SEQ ID NO: 2593 - protein, 11 aa, Artificial Sequence
  Description of Artificial Sequence: Synthetic polypeptide
NYDDPTGVLLT

SEQ ID NO: 2594 - protein, 11 aa, Artificial Sequence
  Description of Artificial Sequence: Synthetic polypeptide
NFEQQNSVEWT

SEQ ID NO: 2595 - protein, 7 aa, Artificial Sequence
  Description of Artificial Sequence: Synthetic polypeptide
SQSGASN

SEQ ID NO: 2596 - protein, 6 aa, Artificial Sequence
  Description of Artificial Sequence: Synthetic polypeptide
NNGSQA

SEQ ID NO: 2597 - protein, 25 aa, Artificial Sequence
  Description of Artificial Sequence: Synthetic polypeptide
YYLSRTNTPSGTTTWSRLQFSQAGA

SEQ ID NO: 2598 - protein, 16 aa, Artificial Sequence
  Description of Artificial Sequence: Synthetic polypeptide
SKTSADNNNSEYSWTG

SEQ ID NO: 2599 - protein, 8 aa, Artificial Sequence
  Description of Artificial Sequence: Synthetic polypeptide
HKDDEEKF

SEQ ID NO: 2600 - protein, 14 aa, Artificial Sequence
  Description of Artificial Sequence: Synthetic polypeptide
KQGSEKTNVDIEEV

SEQ ID NO: 2601 - protein, 14 aa, Artificial Sequence
  Description of Artificial Sequence: Synthetic polypeptide
QRGNNQAATADVNT

SEQ ID NO: 2602 - protein, 12 aa, Artificial Sequence
  Description of Artificial Sequence: Synthetic polypeptide
NYNKKSVNVDFT

SEQ ID NO: 2603 - protein, 42 aa, Artificial Sequence
  Description of Artificial Sequence: Synthetic polypeptide
SQSGASNYNTPSGTTTQSRLQFSTSADNNNSEYSWTGATKYH

SEQ ID NO: 2604 - protein, 42 aa, Artificial Sequence
  Description of Artificial Sequence: Synthetic polypeptide
SASGASNFNSEGGSLTQSSLGFSTDGENNNSDFSWTGATKYH

SEQ ID NO: 2605 - protein, 42 aa, Artificial Sequence
  Description of Artificial Sequence: Synthetic polypeptide
SQSGASNYNTPSGTTTQSRLQFSTDGENNNSDFSWTGATKYH

SEQ ID NO: 2606 - protein, 42 aa, Artificial Sequence
  Description of Artificial Sequence: Synthetic polypeptide
SASGASNYNTPSGTTTQSRLQFSTSADNNNSEFSWPGATTYH

SEQ ID NO: 2607 - protein, 42 aa, Artificial Sequence
  Description of Artificial Sequence: Synthetic polypeptide
SQSGASNFNSEGGSLTQSSLGFSTDGENNNSDFSWTGATKYH

SEQ ID NO: 2608 - protein, 42 aa, Artificial Sequence
  Description of Artificial Sequence: Synthetic polypeptide
SASGASNYNTPSGSLTQSSLGFSTDGENNNSDFSWTGATKYH

SEQ ID NO: 2609 - protein, 42 aa, Artificial Sequence
  Description of Artificial Sequence: Synthetic polypeptide
SQSGASNYNTPSGTTTQSRLQFSTSADNNNSDFSWTGATKYH

SEQ ID NO: 2610 - protein, 42 aa, Artificial Sequence
  Description of Artificial Sequence: Synthetic polypeptide
SGAGASNFNSEGGSLTQSSLGFSTDGENNNSDFSWTGATKYH

SEQ ID NO: 2611 - protein, 7 aa, Artificial Sequence
  Description of Artificial Sequence: Synthetic polypeptide
SGAGASN

SEQ ID NO: 2612 - protein, 15 aa, Artificial Sequence
  Description of Artificial Sequence: Synthetic polypeptide
NSEGGSLTQSSLGFS

SEQ ID NO: 2613 - protein, 11 aa, Artificial Sequence
  Description of Artificial Sequence: Synthetic polypeptide
TDGENNNSDFS

SEQ ID NO: 2614 - protein, 10 aa, Artificial Sequence
  Description of Artificial Sequence: Synthetic polypeptide
SEFSWPGATT

SEQ ID NO: 2615 - protein, 13 aa, Artificial Sequence
  Description of Artificial Sequence: Synthetic polypeptide
TSADNNNSDFSWT

SEQ ID NO: 2616 - protein, 8 aa, Artificial Sequence
  Description of Artificial Sequence: Synthetic polypeptide
SQSGASNY

SEQ ID NO: 2617 - protein, 15 aa, Artificial Sequence
  Description of Artificial Sequence: Synthetic polypeptide
NTPSGTTTQSRLQFS

SEQ ID NO: 2618 - protein, 19 aa, Artificial Sequence
  Description of Artificial Sequence: Synthetic polypeptide
TSADNNNSEYSWTGATKYH

SEQ ID NO: 2619 - protein, 8 aa, Artificial Sequence
  Description of Artificial Sequence: Synthetic polypeptide
SASGASNF

SEQ ID NO: 2620 - protein, 19 aa, Artificial Sequence
  Description of Artificial Sequence: Synthetic polypeptide
TDGENNNSDFSWTGATKYH

SEQ ID NO: 2621 - protein, 8 aa, Artificial Sequence
  Description of Artificial Sequence: Synthetic polypeptide
SASGASNY

SEQ ID NO: 2622 - protein, 19 aa, Artificial Sequence
  Description of Artificial Sequence: Synthetic polypeptide
TSADNNNSEFSWPGATTYH

SEQ ID NO: 2623 - protein, 15 aa, Artificial Sequence
  Description of Artificial Sequence: Synthetic polypeptide
NTPSGSLTQSSLGFS

SEQ ID NO: 2624 - protein, 19 aa, Artificial Sequence
  Description of Artificial Sequence: Synthetic polypeptide
TSADNNNSDFSWTGATKYH

SEQ ID NO: 2625 - protein, 8 aa, Artificial Sequence
  Description of Artificial Sequence: Synthetic polypeptide
SGAGASNF

SEQ ID NO: 2626 - protein, 48 aa, Artificial Sequence
  Description of Artificial Sequence: Synthetic polypeptide
CTCCAGVVSVVSMRSRVCVNSGCAGCTDHCVVSRNSGTCVMSACACAA

SEQ ID NO: 2627 - protein, 48 aa, Artificial Sequence
  Description of Artificial Sequence: Synthetic polypeptide
CTCCAGAGAGGCAACAGACAAGCAGCTACCGCAGATGTCAACACACAA

SEQ ID NO: 2628 - protein, 7 aa, Artificial Sequence
  Description of Artificial Sequence: Synthetic polypeptide
SAAGASN

SEQ ID NO: 2629 - protein, 24 aa, Artificial Sequence
  Description of Artificial Sequence: Synthetic polypeptide
YFLSRTNTESGSTTQSTLRFSQAG

SEQ ID NO: 2630 - protein, 13 aa, Artificial Sequence
  Description of Artificial Sequence: Synthetic polypeptide
SKTSADNNNSDFS

SEQ ID NO: 2631 - protein, 14 aa, Artificial Sequence
  Description of Artificial Sequence: Synthetic polypeptide
KQGSEKTDVDIDKV

SEQ ID NO: 2632 - protein, 7 aa, Artificial Sequence
  Description of Artificial Sequence: Synthetic polypeptide
STAGASN

SEQ ID NO: 2633 - protein, 24 aa, Artificial Sequence
  Description of Artificial Sequence: Synthetic polypeptide
YFLSRTNTTSGIETQSTLRFSQAG

SEQ ID NO: 2634 - protein, 13 aa, Artificial Sequence
  Description of Artificial Sequence: Synthetic polypeptide
SKTDGENNNSDFS

SEQ ID NO: 2635 - protein, 14 aa, Artificial Sequence
  Description of Artificial Sequence: Synthetic polypeptide
KQGAAADDVEIDGV

SEQ ID NO: 2636 - protein, 7 aa, Artificial Sequence
  Description of Artificial Sequence: Synthetic polypeptide
SEAGASN

SEQ ID NO: 2637 - protein, 24 aa, Artificial Sequence
  Description of Artificial Sequence: Synthetic polypeptide
YYLSRTNTPSGTTTQSRLQFSQAG

SEQ ID NO: 2638 - protein, 13 aa, Artificial Sequence
  Description of Artificial Sequence: Synthetic polypeptide
SKTSADNNNSEYS

SEQ ID NO: 2639 - protein, 14 aa, Artificial Sequence
  Description of Artificial Sequence: Synthetic polypeptide
KQGSEKTNVDIEKV

SEQ ID NO: 2640 - protein, 24 aa, Artificial Sequence
  Description of Artificial Sequence: Synthetic polypeptide
YFLSRTNDASGSDTKSTLLFSQAG

SEQ ID NO: 2641 - protein, 13 aa, Artificial Sequence
  Description of Artificial Sequence: Synthetic polypeptide
STTPSENNNSEYS

SEQ ID NO: 2642 - protein, 7 aa, Artificial Sequence
  Description of Artificial Sequence: Synthetic polypeptide
SAAGATN

SEQ ID NO: 2643 - protein, 24 aa, Artificial Sequence
  Description of Artificial Sequence: Synthetic polypeptide
YFLSRTNGEAGSATLSELRFSQAG

SEQ ID NO: 2644 - protein, 8 aa, Artificial Sequence
  Description of Artificial Sequence: Synthetic polypeptide
HGDDADRF

SEQ ID NO: 2645 - protein, 14 aa, Artificial Sequence
  Description of Artificial Sequence: Synthetic polypeptide
KQGAEKSDVEVDRV

SEQ ID NO: 2646 - protein, 14 aa, Artificial Sequence
  Description of Artificial Sequence: Synthetic polypeptide
KQDSGGDNIDIDQV

SEQ ID NO: 2647 - protein, 7 aa, Artificial Sequence
  Description of Artificial Sequence: Synthetic polypeptide
SDAGASN

SEQ ID NO: 2648 - protein, 24 aa, Artificial Sequence
  Description of Artificial Sequence: Synthetic polypeptide
YFLSRTNTEGGHDTQSTLRFSQAG

SEQ ID NO: 2649 - protein, 14 aa, Artificial Sequence
  Description of Artificial Sequence: Synthetic polypeptide
KEDGGGSDVAIDEV

SEQ ID NO: 2650 - protein, 7 aa, Artificial Sequence
  Description of Artificial Sequence: Synthetic polypeptide
SNAGASN

SEQ ID NO: 2651 - protein, 24 aa, Artificial Sequence
  Description of Artificial Sequence: Synthetic polypeptide
YFLSRTNGEAGSATLSELRFSQPG

SEQ ID NO: 2652 - DNA, 21 bp, Artificial Sequence
  Description of Artificial Sequence: Synthetic polynucleotide
  misc_feature (4)..(5): n is a, c, or g
  misc_feature (6)..(6): n is a or c
  misc_feature (7)..(7): n is a, g, or t
  misc_feature (13)..(13): n is a or g
  misc_feature (14)..(14): n is g or c
  misc_feature (17)..(17): n is g or c
agcnnnncagganncancaac

SEQ ID NO: 2653 - DNA, 18 bp, Artificial Sequence
  Description of Artificial Sequence: Synthetic polynucleotide
  misc_feature (4)..(4): n is a or g
  misc_feature (7)..(8): n is a or g
  misc_feature (9)..(9): n is g or c
  misc_feature (10)..(10): n is a or c
  misc_feature (11)..(11): n is a or g
  misc_feature (12)..(12): n is g or c
  misc_feature (13)..(13): n is a or c
aacnacnnnnnnnaggca

SEQ ID NO: 2654 - DNA, 24 bp, Artificial Sequence
  Description of Artificial Sequence: Synthetic polynucleotide
  misc_feature (4)..(5): n is a or g
  misc_feature (10)..(11): n is a or g
  misc_feature (13)..(13): n is a or g
  misc_feature (14)..(14): n is a or c
  misc_feature (15)..(15): n is g or c
  misc_feature (16)..(17): n is a or g
  misc_feature (18)..(18): n is g or c
  misc_feature (20)..(20): n is a or g
  misc_feature (21)..(21): n is g or c
cacnnggacnncnnnnnnannttt

SEQ ID NO: 2655 - DNA, 75 bp, Artificial Sequence
  Description of Artificial Sequence: Synthetic polynucleotide
  misc_feature (22)..(22): n is a or g
  misc_feature (23)..(23): n is a, c, or g
  misc_feature (25)..(26): n is a, c, or g
  misc_feature (27)..(27): n is g or c
  misc_feature (28)..(28): n is a or g
  misc_feature (29)..(29): n is g or c
  misc_feature (34)..(34): n is a or c
  misc_feature (35)..(35): n is a, c, t, or g
  misc_feature (37)..(37): n is a, c, or g
  misc_feature (38)..(38): n is a, c, or t
  misc_feature (39)..(39): n is g or c
  misc_feature (43)..(43): n is a or c
  misc_feature (44)..(44): n is a, c, or t
  misc_feature (45)..(45): n is g or c
  misc_feature (49)..(50): n is a, c, or g
  misc_feature (51)..(51): n is g or c
  misc_feature (55)..(55): n is a, c, or g
  misc_feature (56)..(56): n is a, g, or t
  misc_feature (57)..(57): n is g or c
  misc_feature (67)..(67): n is g or c
  misc_feature (68)..(68): n is c, g, or t
  misc_feature (70)..(70): n is a or g
  misc_feature (72)..(72): n is g or c
tatttcttgagcagaacaaacnncnnnnncgganncnnnacgnnntcannncttnnnttttctcagnncngngcg

SEQ ID NO: 2656 - DNA, 48 bp, Artificial Sequence
  Description of Artificial Sequence: Synthetic polynucleotide
  misc_feature (5)..(5): n is a or c
  misc_feature (7)..(8): n is a or c
  misc_feature (10)..(10): n is a, c, or g
  misc_feature (11)..(11): n is a, c, or g
  misc_feature (12)..(12): n is g or c
  misc_feature (13)..(13): n is a or g
  misc_feature (14)..(14): n is a, c or g
  misc_feature (16)..(16): n is g or c
  misc_feature (17)..(17): n is a or g
  misc_feature (18)..(18): n is g or c
  misc_feature (31)..(31): n is a or g
  misc_feature (33)..(33): n is g or c
  misc_feature (43)..(44): n is a or c
tcaanannannnnncnnnaacaacaacagtnanttctcgtggnnagga

SEQ ID NO: 2657 - DNA, 42 bp, Artificial Sequence
  Description of Artificial Sequence: Synthetic polynucleotide
  misc_feature (4)..(4): n is g or c
  misc_feature (7)..(8): n is a or g
  misc_feature (10)..(10): n is a or g
  misc_feature (11)..(11): n is g or c
  misc_feature (13)..(13): n is a or g
  misc_feature (14)..(14): n is a, c or g
  misc_feature (15)..(15): n is g or c
  misc_feature (16)..(16): n is a or g
  misc_feature (17)..(17): n is a, c, or g
  misc_feature (19)..(19): n is a or g
  misc_feature (20)..(20): n is a, c, or g
  misc_feature (22)..(22): n is a or g
  misc_feature (25)..(25): n is a or g
  misc_feature (26)..(26): n is c or t
  misc_feature (29)..(29): n is a or c
  misc_feature (30)..(30): n is g or c
  misc_feature (31)..(31): n is a, c, t or g
  misc_feature (32)..(32): n is a, c, or t
  misc_feature (34)..(34): n is a or g
  misc_feature (35)..(35): n is a, c, or g
  misc_feature (36)..(36): n is a or c
  misc_feature (37)..(37): n is a, c or g
  misc_feature (38)..(38): n is a or g
  misc_feature (39)..(39): n is g or c
aagnaanncnncnnnnnanncnatnncgnnnncnnnnnngtc

SEQ ID NO: 2658 - DNA, 42 bp, Artificial Sequence
  Description of Artificial Sequence: Synthetic polynucleotide
  misc_feature (4)..(5): n is a, c or g
  misc_feature (5)..(5): n is g or c
  misc_feature (6)..(7): n is a, c or g
  misc_feature (8)..(8): n is g or c
  misc_feature (9)..(9): n is a or c
  misc_feature (10)..(10): n is a or g
  misc_feature (11)..(11): n is g or c
  misc_feature (12)..(12): n is g or c
  misc_feature (13)..(13): n is a or g
  misc_feature (14)..(14): n is a, c, or g
  misc_feature (16)..(16): n is a, c, or g
  misc_feature (17)..(17): n is a, c, or g
  misc_feature (18)..(18): n is g or c
  misc_feature (25)..(25): n is a, g, or t
  misc_feature (26)..(26): n is a, c, or t
  misc_feature (28)..(33): n is a, c, g, or t
  misc_feature (28)..(29): n is a, c, or g
  misc_feature (30)..(30): n is g or c
  misc_feature (31)..(31): n is a or g
  misc_feature (32)..(32): n is a, c, g, or t
  misc_feature (33)..(33): n is g or c
  misc_feature (37)..(37): n is a, c, or g
  misc_feature (38)..(38): n is a or c
  misc_feature (39)..(39): n is g or c
cagnnnnnnnnnnncnnngcagctnncnnnnnngtcnnnaca

SEQ ID NO: 2659 - DNA, 33 bp, Artificial Sequence
  Description of Artificial Sequence: Synthetic polynucleotide
  misc_feature (5)..(5): n is a or t
  misc_feature (7)..(10): n is a, c, g, or t
  misc_feature (7)..(7): n is a or g
  misc_feature (8)..(8): n is a, c or g
  misc_feature (9)..(9): n is g or c
  misc_feature (10)..(10): n is a, c or g
  misc_feature (12)..(12): n is g or c
  misc_feature (13)..(13): n is a or c
  misc_feature (14)..(14): n is a, c or g
  misc_feature (15)..(15): n is g or c
  misc_feature (16)..(16): n is a, c or g
  misc_feature (17)..(17): n is a, c, or t
  misc_feature (18)..(18): n is g or c
  misc_feature (19)..(20): n is a, g, or t
  misc_feature (25)..(25): n is g or c
  misc_feature (26)..(26): n is a or t
  misc_feature (27)..(27): n is g or c
  misc_feature (29)..(29): n is t or g
  misc_feature (30)..(30): n is g or c
aactncnnnnannnnnnnnntgtgnnntnnact

SEQ ID NO: 2660 - DNA, 30 bp, Artificial Sequence
  Description of Artificial Sequence: Synthetic polynucleotide
ttgttgaacatcaccacgtgacgcacgttc

SEQ ID NO: 2661 - DNA, 30 bp, Artificial Sequence
  Description of Artificial Sequence: Synthetic polynucleotide
tccccgtggttctactacataatgtggccg

SEQ ID NO: 2662 - DNA, 30 bp, Artificial Sequence
  Description of Artificial Sequence: Synthetic polynucleotide
ttccacactccgttttggataatgttgaac

SEQ ID NO: 2663 - DNA, 30 bp, Artificial Sequence
  Description of Artificial Sequence: Synthetic polynucleotide
agggacatccccagctccatgctgtggtcg

SEQ ID NO: 2664 - DNA, 30 bp, Artificial Sequence
  Description of Artificial Sequence: Synthetic polynucleotide
agggacaacccctccgactcgccctaatcc

SEQ ID NO: 2665 - DNA, 30 bp, Artificial Sequence
  Description of Artificial Sequence: Synthetic polynucleotide
tcctagtagaagacaccctctcactgcccg

SEQ ID NO: 2666 - DNA, 30 bp, Artificial Sequence
  Description of Artificial Sequence: Synthetic polynucleotide
agtaccatgtacacccactctcccagtgcc

SEQ ID NO: 2667 - DNA, 30 bp, Artificial Sequence
  Description of Artificial Sequence: Synthetic polynucleotide
atatggacgttcatgctgatcaccataccg

SEQ ID NO: 2668 - DNA, 30 bp, Artificial Sequence
  Description of Artificial Sequence: Synthetic polynucleotide
agcaggagctccttggcctcagcgtgcgag

SEQ ID NO: 2669 - DNA, 30 bp, Artificial Sequence
  Description of Artificial Sequence: Synthetic polynucleotide
acaagcagcttcactatgacaaccactgac

SEQ ID NO: 2670 - DNA, 284 bp, Artificial Sequence
  Description of Artificial Sequence: Synthetic polynucleotide
  misc_feature (59)..(59): n is a, c, g, or t
  misc_feature (244)..(244): n is a, c, g, or t
cagcctaggaactggcttcctggaccctgttaccgccagcagagagtctcaamammavnsrvcsrsaacaacaacagtrasttctcctggmmaggagctaccaagtaccacctcaatggcagagactctctggtgaatcccggaccagctatggcaagccacrrggacrrcrmsrrsarsttttttcctcagagcggggttctcatctttgggaagsaarrcrscrvsrvarvcratrycgmsnhcrvmvrsgtcatgattacagacgaagaggagatctggac

SEQ ID NO: 2671 - DNA, 34 bp, Artificial Sequence
  Description of Artificial Sequence: Synthetic polynucleotide
tgggacaatggcggtcgtctctcagagttktkkt

SEQ ID NO: 2672 - DNA, 35 bp, Artificial Sequence
  Description of Artificial Sequence: Synthetic polynucleotide
agaggacckktcctcgatggttcatggtggagtta

SEQ ID NO: 2673 - DNA, 31 bp, Artificial Sequence
  Description of Artificial Sequence: Synthetic polynucleotide
ccacttagggcctggtcgataccgttcggtg

SEQ ID NO: 2674 - DNA, 32 bp, Artificial Sequence
  Description of Artificial Sequence: Synthetic polynucleotide
tctcgccccaagagtagaaacccttcsttyyg

SEQ ID NO: 2675 - protein, 735 aa, Adeno-associated virus 2 [sequence omitted]

SEQ ID NO: 2676 - protein, 736 aa, Adeno-associated virus 9; identical to SEQ ID NO: 123

SEQ ID NO: 2677 - protein, 7 aa, Artificial Sequence
  Description of Artificial Sequence: Synthetic polypeptide
GSTPPPM

SEQ ID NO: 2678 - protein, 7 aa, Artificial Sequence
  Description of Artificial Sequence: Synthetic polypeptide
GETRAPL

SEQ ID NO: 2679 - protein, 6 aa, Artificial Sequence
  Description of Artificial Sequence: Synthetic polypeptide
SPAKFA

SEQ ID NO: 2680 - protein, 6 aa, Artificial Sequence
  Description of Artificial Sequence: Synthetic polypeptide
NKDKLN

SEQ ID NO: 2681 - DNA, 5 bp, Artificial Sequence
  H1 terminator sequence
ttttt

SEQ ID NO: 2682 - DNA, 1165 bp, Artificial Sequence; identical to SEQ ID NO: 1839
  ITR to ITR sequences of VOYPC59

SEQ ID NO: 2683 - DNA, 1267 bp, Artificial Sequence; identical to SEQ ID NO: 1842
  ITR to ITR sequences of VOYPC60

SEQ ID NO: 2684 - DNA, 1267 bp, Artificial Sequence; identical to SEQ ID NO: 1841
  ITR to ITR sequences of VOYPC61

SEQ ID NO: 2685 - DNA, 1369 bp, Artificial Sequence; identical to SEQ ID NO: 1840
  ITR to ITR sequences of VOYPC62

SEQ ID NO: 2686 - DNA, 1676 bp, Artificial Sequence; identical to SEQ ID NO: 1832
  ITR to ITR sequences of VOYPC13

SEQ ID NO: 2687 - DNA, 1778 bp, Artificial Sequence; identical to SEQ ID NO: 1833
  ITR to ITR sequences of VOYPC14

SEQ ID NO: 2688 - DNA, 1778 bp, Artificial Sequence; identical to SEQ ID NO: 1834
  ITR to ITR sequences of VOYPC15

SEQ ID NO: 2689 - DNA, 1880 bp, Artificial Sequence; identical to SEQ ID NO: 1835
  ITR to ITR sequences of VOYPC16

SEQ ID NO: 2690 - DNA, 844 bp, Artificial Sequence
  ITR to ITR sequences of H1 promoter followed by VOYHTmiR-127.579
ctgcgcgctcgctcgctcactgaggccgcccgggcaaagcccgggcgtcgggcgacctttggtcgcccggcctcagtgagcgagcgagcgcgcagagagggagtgtagccatgctctaggaagatcaattcaattcacgcgttgacgtacgaaattcgaacgctgacgtcatcaacccgctccaaggaatcgcgggcccagtgtcactaggcgggaacacccagcgcgcgtgcgccctggcaggaagatggctgtgagggacagggagtggcgccctgcaatatttgcatgtcgctatgtgttctgggaaatcaccataaacgtgaaatgtctttggatttgggaatcttataagttctgtatgagaccacaccggtgaagcaaagaaggggcagagggagcccgtgagctgagtgggccagggactgggagaaggagtgaggaggcagggccggcatgcctctgctgctggccagacctgctagctccatgcttcccgtctgcacctgtcactagtaagcatggagctagcaggtttggccgtgtagtgctacccagcgctggctgcctcctcagcattgcaattcctctcccatctgggcaccagtcagctaccctggtgggaatctgggtagccctcgagatagcggccgcccccgagatctttttatgtacatctagataagtagcatggcgggttaatcattaactacaaggaacccctagtgatggagttggccactccctctctgcgcgctcgctcgctcactgaggccgggcgaccaaaggtcgcccgacgcccgggctttgcccgggcggcctcagtgagcgagcgagcgcgcag

SEQ ID NO: 2691 - DNA, 742 bp, Artificial Sequence
  ITR to ITR sequences of H1 promoter followed by VOYHTmiR-104.016
ctgcgcgctcgctcgctcactgaggccgcccgggcaaagcccgggcgtcgggcgacctttggtcgcccggcctcagtgagcgagcgagcgcgcagagagggagtgtagccatgctctaggaagatcaattcaattcacgcgttgacgtacgaaattcgaacgctgacgtcatcaacccgctccaaggaatcgcgggcccagtgtcactaggcgggaacacccagcgcgcgtgcgccctggcaggaagatggctgtgagggacagggagtggcgccctgcaatatttgcatgtcgctatgtgttctgggaaatcaccataaacgtgaaatgtctttggatttgggaatcttataagttctgtatgagaccacaccggtgtgctgggcggggggcggcgggccctcccgcagaacaccatgcgctcttcggaagcaattcagtctcgttgtgcctgtgacctggtacaacgagactgaattgcttctgaggagcgccttgacagcagccatgggagggccgccccctacctcagtgactcgagatagcggccgcccccgagatctttttatgtacatctagataagtagcatggcgggttaatcattaactacaaggaacccctagtgatggagttggccactccctctctgcgcgctcgctcgctcactgaggccgggcgaccaaaggtcgcccgacgcccgggctttgcccgggcggcctcagtgagcgagcgagcgcgcag

SEQ ID NO: 2692 - DNA, 1584 bp, Artificial Sequence
  ITR to ITR sequences of CMV promoter followed by VOYHTmiR-127.579
ctgcgcgctcgctcgctcactgaggccgcccgggcaaagcccgggcgtcgggcgacctttggtcgcccggcctcagtgagcgagcgagcgcgcagagagggagtgtagccatgctctaggaagatcaattcaattcacgcgtcgacattgattattgactagttattaatagtaatcaattacggggtcattagttcatagcccatatatggagttccgcgttacataacttacggtaaatggcccgcctggctgaccgcccaacgacccccgcccattgacgtcaataatgacgtatgttcccatagtaacgccaatagggactttccattgacgtcaatgggtggagtatttacggtaaactgcccacttggcagtacatcaagtgtatcatatgccaagtacgccccctattgacgtcaatgacggtaaatggcccgcctggcattatgcccagtacatgaccttatgggactttcctacttggcagtacatctacgtattagtcatcgctattaccatgtcgaggccacgttctgcttcactctccccatctcccccccctccccacccccaattttgtatttatttattttttaattattttgtgcagcgatgggggcggggggggggggcgcgcgccaggcggggcggggcggggcgaggggcggggcggggcgaggcggagaggtgcggcggcagccaatcagagcggcgcgctccgaaagtttccttttatggcgaggcggcggcggcggcggccctataaaaagcgaagcgcgcggcgggcgggagcaagcttgaactgaaaaaccagaaagttaactggtaagtttagtctttttgtcttttatttcaggtcccggatccggtggtggtgcaaatcaaagaactgctcctcagtggatgttgcctttacttctaggcctgtacggaagtgttacttctgctctaaaagctgcggaattgtacccgcggccgatccaccggtgaagcaaagaaggggcagagggagcccgtgagctgagtgggccagggactgggagaaggagtgaggaggcagggccggcatgcctctgctgctggccagacctgctagctccatgcttcccgtctgcacctgtcactagtaagcatggagctagcaggtttggccgtgtagtgctacccagcgctggctgcctcctcagcattgcaattcctctcccatctgggcaccagtcagctaccctggtgggaatctgggtagccctcgaggacggggtgaactacgcctgaggatccgatctttttccctctgccaaaaattatggggacatcatgaagccccttgagcatctgacttctggctaataaaggaaatttattttcattgcaatagtgtgttggaattttttgtgtctctcactcggcctaggtagataagtagcatggcgggttaatcattaactacaaggaacccctagtgatggagttggccactccctctctgcgcgctcgctcgctcactgaggccgggcgaccaaaggtcgcccgacgcccgggctttgcccgggcggcctcagtgagcgagcgagcgcgcag

SEQ ID NO: 2693 - DNA, 1482 bp, Artificial Sequence
  ITR to ITR sequences of CMV promoter followed by VOYHTmiR-104.016
ctgcgcgctcgctcgctcactgaggccgcccgggcaaagcccgggcgtcgggcgacctttggtcgcccggcctcagtgagcgagcgagcgcgcagagagggagtgtagccatgctctaggaagatcaattcaattcacgcgtcgacattgattattgactagttattaatagtaatcaattacggggtcattagttcatagcccatatatggagttccgcgttacataacttacggtaaatggcccgcctggctgaccgcccaacgacccccgcccattgacgtcaataatgacgtatgttcccatagtaacgccaatagggactttccattgacgtcaatgggtggagtatttacggtaaactgcccacttggcagtacatcaagtgtatcatatgccaagtacgccccctattgacgtcaatgacggtaaatggcccgcctggcattatgcccagtacatgaccttatgggactttcctacttggcagtacatctacgtattagtcatcgctattaccatgtcgaggccacgttctgcttcactctccccatctcccccccctccccacccccaattttgtatttatttattttttaattattttgtgcagcgatgggggcggggggggggggcgcgcgccaggcggggcggggcggggcgaggggcggggcggggcgaggcggagaggtgcggcggcagccaatcagagcggcgcgctccgaaagtttccttttatggcgaggcggcggcggcggcggccctataaaaagcgaagcgcgcggcgggcgggagcaagcttgaactgaaaaaccagaaagttaactggtaagtttagtctttttgtcttttatttcaggtcccggatccggtggtggtgcaaatcaaagaactgctcctcagtggatgttgcctttacttctaggcctgtacggaagtgttacttctgctctaaaagctgcggaattgtacccgcggccgatccaccggtgtgctgggcggggggcggcgggccctcccgcagaacaccatgcgctcttcggaagcaattcagtctcgttgtgcctgtgacctggtacaacgagactgaattgcttctgaggagcgccttgacagcagccatgggagggccgccccctacctcagtgactcgaggacggggtgaactacgcctgaggatccgatctttttccctctgccaaaaattatggggacatcatgaagccccttgagcatctgacttctggctaataaaggaaatttattttcattgcaatagtgtgttggaattttttgtgtctctcactcggcctaggtagataagtagcatggcgggttaatcattaactacaaggaacccctagtgatggagttggccactccctctctgcgcgctcgctcgctcactgaggccgggcgaccaaaggtcgcccgacgcccgggctttgcccgggcggcctcagtgagcgagcgagcgcgcag
